(19) United States
(12) Patent Application Publication
(10) Pub. No.: US 2021/0071258 A1
(43) Pub. Date: Mar. 11, 2021

(54) GENE EXPRESSION AND ASSESSMENT OF RISK OF DEVELOPING TOXICITY FOLLOWING CELL THERAPY

(71) Applicant: Juno Therapeutics, Inc., Seattle, WA (US)

(72) Inventors: Robert F. DUBOSE, Seattle, WA (US); Nels Eric OLSON, Seattle, WA (US); Seamus RAGAN, Seattle, WA (US); Claire L. SUTHERLAND, Seattle, WA (US)

(73) Assignee: Juno Therapeutics, Inc., Seattle, WA (US)

(21) Appl. No.: 16/643,403

(22) PCT Filed: Aug. 31, 2018
(86) PCT No.: PCT/US2018/049283

§ 371 Date: Feb. 28, 2020

Related U.S. Application Data
(60) Provisional application No. 62/679,759, filed on Jun. 1, 2018.
(60) Provisional application No. 62/672,562, filed on May 16, 2018.
(60) Provisional application No. 62/584,725, filed on Nov. 10, 2017.
(60) Provisional application No. 62/563,639, filed on Sep. 26, 2017.
(60) Provisional application No. 62/553,790, filed on Sep. 1, 2017.

(51) Int. Cl. C12Q 1/6886; G01N 33/50

(52) U.S. Cl. CPC C12Q 1/6886; G01N 33/5014; C12Q 2600/158; C12Q 2600/106; G01N 33/5088

(57) ABSTRACT

Provided herein are methods for determining if a subject is at risk for developing a toxicity, e.g., neurotoxicity, following administration of a therapy, such as an immunotherapy or cell therapy, e.g., a chimeric antigen receptor (CAR) T cell therapy based on the expression, in a sample obtained from the subject, of one or more genes or gene products that are associated with and/or correlate to a risk of developing toxicity following administration of the therapy. In some aspects, the sample is a sample obtained from the subject prior to receiving the therapy. Also provided are methods for treating a subject having a disease or condition, such as acute lymphoblastic leukemia (ALL), according to a particular treatment regimen, in some cases involving administration of the immunotherapy or cell therapy, based on assessment of risk of developing a toxicity following administration of the therapy. Also provided herein are reagents and kits for performing the methods.

### CROSS-REFERENCE TO RELATED APPLICATIONS

[0001] This application claims priority from U.S. provisional applications No. 62/553,790, filed Sep. 1, 2017, entitled “GENE EXPRESSION AND ASSESSMENT OF RISK OF DEVELOPING TOXICITY FOLLOWING CELL THERAPY,” No. 62/563,639, filed Sep. 26, 2017, entitled “GENE EXPRESSION AND ASSESSMENT OF RISK OF DEVELOPING TOXICITY FOLLOWING CELL THERAPY,” No. 62/584,725, filed Nov. 10, 2017, entitled “GENE EXPRESSION AND ASSESSMENT OF RISK OF DEVELOPING TOXICITY FOLLOWING CELL THERAPY,” No. 62/672,562, filed May 16, 2018, entitled “GENE EXPRESSION AND ASSESSMENT OF RISK OF DEVELOPING TOXICITY FOLLOWING CELL THERAPY,” and No. 62/679,759, filed Jun. 1, 2018, entitled “GENE EXPRESSION AND ASSESSMENT OF RISK OF DEVELOPING TOXICITY FOLLOWING CELL THERAPY,” the contents of which are incorporated by reference in their entirety.

### INCORPORATION BY REFERENCE OF SEQUENCE LISTING

[0002] The present application is being filed along with a Sequence Listing in electronic format. The Sequence Listing is provided as a file entitled 735042011340SeqList.TXT, created August 27, 2018, which is 930,586 bytes in size. The information in the electronic format of the Sequence Listing is incorporated by reference in its entirety.

### FIELD

[0003] The present disclosure provides methods for determining if a subject is at risk for developing a toxicity, e.g., neurotoxicity, following administration of a therapy, such as an immunotherapy or cell therapy, e.g., a chimeric antigen receptor (CAR) T cell therapy, based on the expression, in a sample obtained from the subject, of one or more genes or gene products that are associated with and/or correlate to a risk of developing toxicity following administration of the therapy. In some aspects, the sample is a sample obtained from the subject prior to receiving the therapy. The present disclosure also provides methods for treating a subject having a disease or condition, such as acute lymphoblastic leukemia (ALL), according to a particular treatment regimen, in some cases involving administration of the immunotherapy or cell therapy, based on assessment of risk of developing a toxicity following administration of the therapy. Also provided herein are reagents and kits for performing the methods.

### BACKGROUND

[0004] Immunotherapies such a chimeric antigen receptors (CAR) T cell therapies have shown great promise for treating subjects with cancers, including relapsed and refractory B-cell neoplasms, such as acute lymphoblastic leukemia, chronic lymphocytic leukemia, and non-Hodgkin lymphomas. However, despite their success, immunotherapies such as CAR-T cell therapies can be accompanied by adverse effects and toxicity, such as cytokine release syndrome and neurotoxicity. The mechanisms underlying these toxicities are not completely understood. The present disclosure provides tools and techniques to identify and assess a risk of toxicity associated with therapeutic cell compositions, as well as tools and techniques to administer therapeutic cell compositions in a manner that reduces or prevents a risk of toxicity.

### SUMMARY

[0005] Provided herein are methods, gene signatures or panels, kits and articles of manufacture for use in assessing or predicting whether a subject may have a risk of developing a neurotoxicity, such as severe neurotoxicity, such as whether the subject has a high or low risk of developing severe neurotoxicity, following administration of an immunotherapy, such as a cell therapy containing cells expressing a recombinant receptor (e.g. CAR-T cells). In some aspects, the neurotoxicity is a severe neurotoxicity, such as a specified grade or severity of neurotoxicity, for example grade 4 or grade 5 neurotoxicity. In some aspects, the methods include assessing a sample, such as a biological sample, from a subject prior to the subject having receiving an immunotherapy and/or from a biological sample that does not contain cells genetically engineered with the recombinant receptors, such that the provided embodiments can be used for identifying subjects at risk prior to receiving the immunotherapy, e.g. cell therapy. In some aspects, the provided embodiments offer methods, reagents and kits for classifying or assessing risk of development of a neurotoxicity following administration of an immunotherapy, such as a cell therapy, based on patient-specific characteristics as opposed to drug product characteristics.

[0006] Provided herein is a method of assessing a risk of a toxicity or a toxicity-related outcome, following administration of an immunotherapy, which is optionally a cell therapy, in which the method comprises assessing the presence, absence or level of expression of one or more gene products or portions thereof in a sample from a subject that is a candidate for receiving a cell therapy for treatment of a disease or condition, said cell therapy comprising a dose of genetically engineered cells expressing a recombinant receptor, wherein the one or more gene products is associated with a risk of developing neurotoxicity following administration of the cell therapy; and the sample does not comprise cells genetically engineered with the recombinant receptor and/or is obtained from the subject prior to receiving the cell therapy; and comparing the presence, absence or level of expression of the one or more gene products or portions thereof to a gene reference value, wherein the comparison indicates the risk or likely risk of the subject developing a neurotoxicity, optionally a specified grade or severity of neurotoxicity, following administration of the therapy to the subject. In some aspects, each of the one or more gene products is individually compared to a gene reference value for the respective gene product. In some embodiments, the disease or condition is acute lymphoblastic leukemia (ALL) or a subtype thereof.

[0007] In some embodiments of any of the provided methods, (a) at least one of the one or more gene products is from a first group of gene products that negatively correlate to a risk of developing neurotoxicity; and/or (b) at least one of the one or more gene products is from a second group of gene products that positively correlates to a risk of developing neurotoxicity. In some embodiments, the at least one gene product is from (a) and is selected from ABCA9, ADAMTSL4, ADGRA2, ADGRF1, AK5, APOL1, ARHGAP27, ARID3B, CA6, CABP7, CCDC152, CCL17, CCR1, CCR6, CEP85L, CISH, CR2, ENAM, ENPP2, EPHA4, FTH1P11, FTH1P2, FTH1P8, GADD45A, GAS6, GBP3, GBP5, GBP6, GIMAP1-GIMAP5, GLI2, GPA33, GPRIN3, HSPA1A, IFITM1, IFITM3, IL15, IL2RA, JCHAIN, KIAA1257, LA16c-390H2.4, LAMB1, LDB3, LINC00623, LST1, LTB, LY6E, MAS1, MUC4, NLRC3, PLXNA4, PON2, PTGES3P1, PTP4A3, RNU1-1, RP11-345J4.6, RP11-421N8.1, RP11-51J9.5, RP11-51O6.1, RP11-552F3.9, RP11-686D22.9, RP11-723D22.3, RP11-723O4.6, RP13-512J5.1, RP4-620F22.2, RP5-940J5.9, RP6-109B7.5, RPL21P75, RYR2, SAMD9L, SEMA6A, SLC37A3, SNRPEP4, SOCS1, SPATS2L, SPON1, SV2C, TMEM154, TP53INP1, TNF, TRIM47, UST, or WNT9A, ENG, SELE, ICAM3, or IL6R, or is a portion or fragment thereof. In some embodiments, the at least one gene product is from (b) and is selected from ASAP2, ATP8B1, ATP9A, CCNA1, CDHR3, CECR2, CELF4, DLX1, DPYSL3, EHD4, FMNL2, GGA2, GPR176, HHIPL1, HOXA7, HMX3, IGF2BP1, IL3RA, IRX3, IRX5, KCNIP1, KIAA1644, LINC00092, LINC01483, MDFI, MIB1, MMP14, NOM1, OTOA, PCDHGA12, PCDHGA4, PCDHGA6, PCDHGB1, PCDHGB5, PCDHGB6, PINLYP, PPM1E, PRKD1, PROKR2, PRSS12, PRTG, PTCH1, RFX8, RP11-146B14.1, RP11-3P17.5, RP11-41O4.1, RP11-713N11.4, RP4-568B10.1, SERF1A, SEZ6L, SMURF1, TBC1D30, TCF12, TCP11, TM9SF3, TMPRSS15, TMSB15A, TNKS1BP1, TREM2, TTC28, PCDHGA9, FMNL1, or ZNF415 or is a portion or fragment thereof. In some embodiments, the disease or condition is acute lymphoblastic leukemia (ALL) or a subtype thereof.

[0008] Provided herein is a method of assessing a risk of toxicity following administration of an immunotherapy or a cell therapy, in which the method includes (1) assessing the presence, absence or level of expression of one or more gene products or a portion thereof in a sample from a subject that is a candidate for receiving a cell therapy for treating a disease or condition, wherein (a) at least one of the one or more gene products is selected from ABCA9, ADAMTSL4, ADGRA2, ADGRF1, AK5, APOL1, ARHGAP27, ARID3B, CA6, CABP7, CCDC152, CCL17, CCR1, CCR6, CEP85L, CISH, CR2, CRLF2, ENAM, ENPP2, EPHA4, FTH1P11, FTH1P2, FTH1P8, GADD45A, GAS6, GBP3, GBP5, GBP6, GIMAP1-GIMAP5, GLI2, GPA33, GPRIN3, HSPA1A, IFITM1, IFITM3, IL15, IL2RA, JCHAIN, KIAA1257, LA16c-390H2.4, LAMB1, LDB3, LINC00623, LST1, LTB, LY6E, MAS1, MUC4, NLRC3, PLXNA4, PON2, PTGES3P1, PTP4A3, RNU1-1, RP11-345J4.6, RP11-421N8.1, RP11-51J9.5, RP11-51O6.1, RP11-552F3.9, RP11-686D22.9, RP11-723D22.3, RP11-723O4.6, RP13-512J5.1, RP4-620F22.2, RP5-940J5.9, RP6-109B7.5, RPL21P75, RYR2, SAMD9L, SEMA6A, SLC37A3, SNRPEP4, SOCS1, SPATS2L, SPON1, SV2C, TMEM154, TP53INP1, TNF, TRIM47, UST, WNT9A, ENG, SELE, ICAM3, or IL6R, or is a portion or fragment thereof; and/or (b) at least one of the one or more gene products is selected from ASAP2, ATP8B1, ATP9A, CCNA1, CDHR3, CECR2, CELF4, DLX1, DPYSL3, EHD4, FMNL2, GGA2, GPR176, HHIPL1, HOXA7, HMX3, IGF2BP1, IL3RA, IRX3, IRX5, KCNIP1, KIAA1644, LINC00092, LINC01483, MDFI, MIB1, MMP14, NOM1, OTOA, PCDHGA12, PCDHGA4, PCDHGA6, PCDHGB1, PCDHGB5, PCDHGB6, PINLYP, PPM1E, PRKD1, PROKR2, PRSS12, PRTG, PTCH1, RFX8, RP11-146B14.1, RP11-3P17.5, RP11-41O4.1, RP11-713N11.4, RP4-568B10.1, SERF1A, SEZ6L, SMURF1, TBC1D30, TCF12, TCP11, TM9SF3, TMPRSS15, TMSB15A, TNKS1BP1, TREM2, TTC28, PCDHGA9, FMNL1, or ZNF415 or is a portion or fragment thereof; and (2) comparing the presence, absence or level of expression of the one or more gene product to a gene reference value, wherein the comparison indicates whether the subject is or is likely at risk of developing a neurotoxicity or grade or severity thereof following administration of the cell therapy when administered to the subject. In some embodiments, one or more gene products positively correlates to a risk of developing neurotoxicity. In some embodiments of such methods, each of the one or more gene products is individually compared to a gene reference value for the respective gene product. In some embodiments, the sample, which can be a biological sample from the subject, does not comprise cells genetically engineered with the recombinant receptor. In some embodiments, the sample, such as a biological sample, does not contain cells genetically engineered with the recombinant receptor and/or is obtained from the subject prior to receiving the cell therapy.

[0009] In some embodiments of any of the provided methods, the presence, absence or level of the one or more gene products is associated with a risk of developing neurotoxicity following administration of the cell therapy or immunotherapy, such as a low or high risk of developing neurotoxicity following administration of a cell therapy or immunotherapy. In some embodiments, expression of the at least one or more gene products from (a) negatively correlate to a risk, such as a high risk, of developing neurotoxicity, such as severe neurotoxicity, for example grade 4 or 5 neurotoxicity. In some embodiments, expression of the at least one or more gene products from (b) positively correlates to a risk, such as a high risk, of developing neurotoxicity, such as severe neurotoxicity, for example grade 4 or 5 neurotoxicity.

[0010] In some of any such embodiments, the comparison indicates the subject is or is likely at risk of developing neurotoxicity, such as is at a high risk of developing neurotoxicity, if the at least one gene product of (a) is at or below a gene reference value and/or the at least one gene product of (b) is at or above a gene reference value; or the comparison indicates the subject is not or is likely not at risk of developing neurotoxicity, such as has a low risk of developing neurotoxicity, if the at least one gene product of (a) is above a gene reference value and/or the at least one gene product of (b) is below a gene reference value.

[0011] In some of any such embodiments, if the comparison indicates the subject is or is likely to develop neurotoxicity, the method includes selecting the subject for administration of a therapeutic regimen. In some aspects, the therapeutic regimen comprising administering to the subject: an agent or other treatment capable of treating, preventing, delaying, reducing or attenuating the development or risk of development of a toxicity and the cell therapy, wherein administration of the agent is to be administered (i) prior to, (ii) within one, two, or three days of, (iii) concurrently with and/or (iv) at first fever following, the initiation of administration of the cell therapy to the subject; ii. the cell therapy at a reduced dose or at a dose that is not associated with risk of developing toxicity or severe toxicity, or is not associated with a risk of developing a toxicity or severe toxicity in a majority of subjects, and/or a majority of subjects having a disease or condition that the subject has or is suspected of having, following administration of the cell therapy; and/or iii. the cell therapy in an in-patient setting and/or with admission to the hospital for one or more days, optionally wherein the cell therapy is otherwise to be administered to subjects on an outpatient basis or without admission to the hospital for one or more days; or iv. an alternative therapeutic treatment other than the cell therapy.

[0012] In some of any such embodiments, if the comparison indicates the subject is not or is likely not at risk of developing neurotoxicity, the method includes selecting the subject for administration of a therapeutic regimen. In some embodiments, the therapeutic regimen comprises administering to the subject: i. the cell therapy, optionally at a non-reduced dose, optionally on an outpatient basis or without admission to the hospital for one or more days; ii. the cell therapy, wherein administration of the cell therapy does not comprise administering, prior to or concurrently with administering the cell therapy and/or prior to the development of a sign or symptom of toxicity other than fever, an agent or treatment capable of treating, preventing, delaying, or attenuating the development of the toxicity; or iii. the cell therapy in an outpatient setting and/or without admission of the subject to the hospital overnight or for one or more consecutive days and/or is without admission of the subject to the hospital for one or more days.

[0013] In some of any such embodiments, following selection of the subject, the method further comprises administering the therapeutic regimen to the selected subject.

[0014] Provided herein is a method of treating comprising administering a therapeutic regimen to a subject that is a candidate for receiving a cell therapy comprising a dose of genetically engineered cells expressing a recombinant receptor for treatment of a disease or condition, wherein the administration is carried out following or based on the results of assessing the presence, absence or level of expression, from a sample from the subject, of one or more gene products or portion thereof, wherein: (a) at least one of the one or more gene products is selected from ABCA9, ADAMTSL4, ADGRA2, ADGRF1, AK5, APOL1, ARHGAP27, ARID3B, CA6, CABP7, CCDC152, CCL17, CCR1, CCR6, CEP85L, CISH, CR2, ENAM, ENPP2, EPHA4, FTH1P11, FTH1P2, FTH1P8, GADD45A, GAS6, GBP3, GBP5, GBP6, GIMAP1-GIMAP5, GLI2, GPA33, GPRIN3, HSPA1A, IFITM1, IFITM3, IL15, IL2RA, JCHAIN, KIAA1257, LA16c-390H2.4, LAMB1, LDB3, LINC00623, LST1, LTB, LY6E, MAS1, MUC4, NLRC3, PLXNA4, PON2, PTGES3P1, PTP4A3, RNU1-1, RP11-345J4.6, RP11-421N8.1, RP11-51J9.5, RP11-51O6.1, RP11-552F3.9, RP11-686D22.9, RP11-723D22.3, RP11-723O4.6, RP13-512J5.1, RP4-620F22.2, RP5-940J5.9, RP6-109B7.5, RPL21P75, RYR2, SAMD9L, SEMA6A, SLC37A3, SNRPEP4, SOCS1, SPATS2L, SPON1, SV2C, TMEM154, TP53INP1, TNF, TRIM47, UST, WNT9A, ENG, SELE, ICAM3, or IL6R, or is a portion or fragment thereof; and/or (b) at least one of the one or more gene products is selected from ASAP2, ATP9A, CCNA1, CDHR3, CECR2, DLX1, DPYSL3, EHD4, FMNL2, GGA2, HHIPL1, HMX3, IGF2BP1, IL3RA, IRX5, KCNIP1, KIAA1644, LINC00092, LINC01483, MIB1, MMP14, NOM1, OTOA, PCDHGA12, PCDHGA4, PCDHGA6, PCDHGB5, PCDHGB6, PINLYP, PPM1E, PRKD1, PROKR2, PRTG, PTCH1, RFX8, RP11-146B14.1, RP11-3P17.5, RP11-41O4.1, RP11-713N11.4, RP4-568B10.1, SERF1A, SEZ6L, SMURF1, TBC1D30, TCF12, TCP11, TM9SF3, TMPRSS15, TNKS1BP1, TTC28, PCDHGA9, FMNL1, or ZNF415 or is a portion or fragment thereof. In some embodiments, the sample, such as a biological sample, does not comprise cells genetically engineered with the recombinant receptor. In some embodiments, the sample, such as a biological sample, is obtained from the subject prior to receiving the cell therapy and/or the sample does not comprise cells expressing the recombinant receptor. In some embodiments, the sample is obtained from the subject prior to receiving the cell therapy and/or the sample does not comprise cells expressing the recombinant receptor.

[0015] In some embodiments, the results of assessing the presence, absence or level of expression of the one or more gene products or portions thereof comprises a comparison to a gene reference value, wherein the comparison indicates the risk or likely risk of the subject developing neurotoxicity following administration of the cell therapy when administered to the subject. In some of any of such embodiments, the one or more gene products are individually compared to a gene reference value for the respective gene product.

[0016] In some embodiments of any of the provided methods, the presence, absence or level of the one or more gene products is associated with a risk of developing neurotoxicity following administration of the cell therapy or immunotherapy, such as a low or high risk of developing neurotoxicity following administration of a cell therapy or immunotherapy. In some embodiments, expression of the at least one or more gene products from (a) negatively correlate to a risk, such as a high risk, of developing neurotoxicity, such as severe neurotoxicity, for example grade 4 or 5 neurotoxicity. In some embodiments, expression of the at least one or more gene products from (b) positively correlates to a risk, such as a high risk, of developing neurotoxicity, such as severe neurotoxicity, for example grade 4 or 5 neurotoxicity.

[0017] In some of any such embodiments, the sample is obtained from the subject prior to receiving the cell therapy and/or the sample does not comprise cells expressing the recombinant receptor. In some of any such embodiments, the presence, absence or level of the one or more gene products is associated with a risk of developing neurotoxicity following administration of the cell therapy.

[0018] In some embodiments of the provided methods, wherein the results of assessing the presence, absence or level of expression of the one or more gene products or portions thereof comprises a comparison to a gene reference value, wherein the comparison indicates the risk or likely risk of the subject developing neurotoxicity following administration of the cell therapy when administered to the subject. In some embodiments of the provided methods, each of the one or more gene products is individually compared to a gene reference value for the respective gene product. In some embodiments of the provided methods: expression of the at least one or more gene products from (a) negatively correlate to a risk that the subject is or is likely to develop neurotoxicity following administration of the cell therapy when it is administered; and/or expression of the at least one or more gene products from (b) positively correlates to a risk that the subject is or is likely to develop neurotoxicity following administration of the cell therapy when it is administered.

[0019] In some embodiments of the provided methods, if the assessing indicates the subject is or is likely to develop neurotoxicity following administration of the immunotherapy, e.g. cell therapy, the therapeutic regimen comprises administering to the subject: i. an agent or other treatment capable of treating, preventing, delaying, reducing or attenuating the development or risk of development of a toxicity and the immunotherapy, e.g. cell therapy, wherein administration of the agent is to be administered (i) prior to, (ii) within one, two, or three days of, (iii) concurrently with and/or (iv) at first fever following, the initiation of administration of the immunotherapy, e.g. cell therapy, to the subject; ii. The immunotherapy, e.g. cell therapy, at a reduced dose or at a dose that is not associated with risk of developing toxicity or severe toxicity, or is not associated with a risk of developing a toxicity or severe toxicity in a majority of subjects, and/or a majority of subjects having a disease or condition that the subject has or is suspected of having, following administration of the immunothearapy, e.g. cell therapy; and/or iii. the immunotherapy, e.g. cell therapy, in an in-patient setting and/or with admission to the hospital for one or more days, optionally wherein the cell therapy is otherwise to be administered to subjects on an outpatient basis or without admission to the hospital for one or more days; or iv. an alternative therapeutic treatment other than the immunotherapy, e.g. cell therapy.

[0020] In some embodiments, provided herein is a therapeutic regimen involving an immunotherapy, such as a cell therapy, e.g. comprising cells engineered with a recombinant receptor, for use in treating a disease or condition in a subject that has been identified as being at risk of developing neurotoxicity or likely being at risk of developing neurotoxicity, e.g. in which the subject's risk is identified or determined in accord with the embodiments herein, such as by assessing the presence, absence or level of expression of one or more gene products as described and comparing the presence, absence or level to a reference value. In some embodiments, the disease or condition is ALL. In some embodiments, the therapeutic regimen comprises administering to the subject: i. an agent or other treatment capable of treating, preventing, delaying, reducing or attenuating the development or risk of development of a toxicity and the immunotherapy, e.g. cell therapy, wherein administration of the agent is to be administered (i) prior to, (ii) within one, two, or three days of, (iii) concurrently with and/or (iv) at first fever following, the initiation of administration of the immunotherapy, e.g. cell therapy, to the subject; ii. the immunotherapy, e.g. cell therapy, at a reduced dose or at a dose that is not associated with risk of developing toxicity or severe toxicity, or is not associated with a risk of developing a toxicity or severe toxicity in a majority of subjects, and/or a majority of subjects having a disease or condition that the subject has or is suspected of having, following administration of the immunotherapy, e.g. cell therapy; and/or iii. the immunotherapy, e.g. cell therapy, in an in-patient setting and/or with admission to the hospital for one or more days, optionally wherein the immunotherapy, e.g. cell therapy, is otherwise to be administered to subjects on an outpatient basis or without admission to the hospital for one or more days; or iv. an alternative therapeutic treatment other than the immunotherapy, e.g. cell therapy.

[0021] In some embodiments, provided herein is an agent or other treatment capable of treating, preventing, delaying, reducing or attenuating the development or risk of development of a neurotoxicity for use in treating, preventing, delaying, reducing or attenuating the development or risk of development of a neurotoxicity following administration of an immunotherapy, e.g. cell therapy, in a subject at has been identified as being at risk of developing neurotoxicity or likely being at risk of developing neurotoxicity, e.g. in which the subject's risk is identified or determined in accord with the embodiments herein, such as by assessing the presence, absence or level of expression of one or more gene products as described and comparing the presence, absence or level to a reference value. In some embodiments, the disease or condition is ALL. In some embodiments, the use of the agent is for administration of the agent (i) prior to, (ii) within one, two or three days of, (iii) concurrently with and/or (iv) at a first fever following the initiation of administration of the immunotherapy, e.g. cell therapy, to the subject.

[0022] In some embodiments of the provided methods, if the assessing indicates the subject is not or is likely not to develop neurotoxicity following administration of the cell therapy, the therapeutic regimen comprises administering to the subject: i. the immunotherapy, e.g. cell therapy, optionally at a non-reduced dose, optionally on an outpatient basis or without admission to the hospital for one or more days; ii. the immunotherapy, e.g. cell therapy, wherein administration of the immunotherapy, e.g. cell therapy, does not comprise administering, prior to or concurrently with administering the immunotherapy, e.g. cell therapy, and/or prior to the development of a sign or symptom of toxicity other than fever, an agent or treatment capable of treating, preventing, delaying, or attenuating the development of the toxicity; or iii. the immunotherapy, e.g. cell therapy, in an outpatient setting and/or without admission of the subject to the hospital overnight or for one or more consecutive days and/or is without admission of the subject to the hospital for one or more days.

[0023] In some embodiments, provided herein is a therapeutic regimen involving an immunotherapy, such as a cell therapy, e.g. comprising cells engineered with a recombinant receptor, for use in treating a disease or condition in a subject that has been identified as not being at risk of developing neurotoxicity or likely not at risk of developing neurotoxicity, such as in which the subject's risk has been identified or determined in accord with the embodiments herein, such as by assessing the presence, absence or level of expression of one or more gene products as described and comparing the presence, absence or level to a reference value. In some embodiments, the disease or condition is ALL. In some embodiments, the therapeutic regimen comprises administering to the subject: i. the immunotherapy, e.g. cell therapy, optionally at a non-reduced dose, optionally on an outpatient basis or without admission to the hospital for one or more days; ii. the cell therapy, wherein administration of the cell therapy does not comprise administering, prior to or concurrently with administering the cell therapy and/or prior to the development of a sign or symptom of toxicity other than fever, an agent or treatment capable of treating, preventing, delaying, or attenuating the development of the toxicity; or iii. the cell therapy in an outpatient setting and/or without admission of the subject to the hospital overnight or for one or more consecutive days and/or is without admission of the subject to the hospital for one or more days.

[0024] In some of any such embodiments, the disease or condition is any disease or condition described herein, optionally a cancer, optionally a myeloma, lymphoma or leukemia. In some of any such embodiments, the at least one gene product is from (a) and is a gene product associated with a PH+ or Ph-like molecular subtype of ALL. In some of any such embodiments, the at least one gene product is selected from ADGRF1, BMPR1B, CA6, CCL17, CCR6, CD99, CHN2, CRLF2, DENND3, ENAM, GAS6, GBP5, GLI2, IFITM1, IGJ (JCHAIN), LDB3, LO645744, MDF1C, MUC4, NRXN3, PON2, PTP4A3, S100Z, SEMA6A, SLC37A3, SLC2A5, SPATS2L, TMEM154, TP53INP1, TTYH2, IL2RA, or WNT9A, or is a portion or fragment of any of the foregoing.

[0025] Provided herein is a method of treatment, the method comprising: selecting a subject that exhibits a Philadelphia chromosome (Ph+) and/or Ph chromosome-like (Ph-like) molecular subtype of acute lymphoblastic leukemia (ALL); and administering to the subject a cell therapy comprising a dose of cells expressing a recombinant receptor that binds to an antigen associated with the ALL.

[0026] Also provided herein is a cell therapy for use in treating ALL in a subject that exhibits or has a Philadelphia chromosome (Ph+) and/or Ph chromosome-like (Ph-like) molecular subtype of acute lymphoblastic leukemia (ALL), said cell therapy comprising a dose of cells expressing a recombinant receptor that binds to an antigen associated with ALL.

[0027] In some of any such embodiments, the subject is selected based on results of cytogenetic or molecular genetic analysis. In some of any such embodiments, the analysis comprises karyotype analysis, fluorescence in situ hybridization (FISH), multicolor FISH, polymerase chain reaction (PCR), a tyrosine kinase inhibitor assay, gene expression profiling or microarray or an immunoassay, optionally an ELISA. In some of any such embodiments: the selected subject exhibits one or more of the (9;22)(q34;q11) chromosomal abnormality; deletion or mutation of IKZF1 transcription factor; a kinase-activating alteration, optionally a rearrangement involving ABL1, ABL2, CRLF2, CSF1R, EPOR, JAK2, NTRK3, PDGFRB, PTK2B, TSLP, or TYK2; a sequence mutation involving FLT3, IL7R, SH2B3, TYK2, IL2RB, NTRK3, DGKH, KRAS, NRAS, PTPN11, NF1; and/or comprises a Ph-like gene expression signature; the subject is selected based on one or more of the presence of the (9;22)(q34;q11) chromosomal abnormality, deletion or mutation of IKZF1 transcription factor; a kinase-activating alteration, optionally a rearrangement involving ABL1, ABL2, CRLF2, CSF1R, EPOR, JAK2, NTRK3, PDGFRB, PTK2B, TSLP, or TYK2; a sequence mutation involving FLT3, IL7R, SH2B3, TYK2, IL2RB, NTRK3, DGKH, KRAS, NRAS, PTPN11, NF1; and/or the presence of a Ph-like gene expression signature.

[0028] In some of any such embodiments, the presence of the Ph-like gene signature is based on comparison of the presence, absence or level of expression, in a sample from the subject, of at least one gene product to a reference gene value, said at least one gene product is selected from (a) ADGRF1, BMPR1B, CA6, CCL17, CCR6, CD99, CHN2, CRLF2, DENND3, ENAM, GAS6, GBP5, GLI2, IFITM1, IGJ (JCHAIN), LDB3, LO645744, MDF1C, MUC4, NRXN3, PON2, PTP4A3, S100Z, SEMA6A, SLC37A3, SLC2A5, SPATS2L, TMEM154, TP53INP1, TTYH2, IL2RA, or WNT9A or a portion or fragment of any of the foregoing and/or said at least one gene product is selected from (b) ASAP2, FMNL2, GPR176, MDFI, PCDHGA12, PCDHGA6, PCDHGB5, PCDHGB6, PINLYP, PTCH1, ATP9A, HMX3, DPYSL3, ZNF415, IRX5, TMPRSS15, IL3RA, IGF2BP1, or TTC28 or is a portion or fragment of any of the foregoing, whereby the comparison indicates whether the subject exhibits a Ph-like molecular subtype of ALL.

[0029] In some of any such embodiments, each of the one or more gene products is individually compared to a gene reference value for the respective gene product. In some of any such embodiments, wherein the subject exhibits a Ph-like molecular subtype of ALL if the comparison indicates the at least one gene product of (a) is above a gene reference value and/or the at least one gene product of (b) is below a gene reference value. In some of any such embodiments, the at least one gene product selected from (a) is ADGRF1, BMPR1B, CA6, CD99, CHN2, CRLF2, DENND3, ENAM, GBP5, GLI2, IFITM1, IGJ (JCHAIN), LDB3, LO645744, MDF1C, MUC4, NRXN3, PON2, S100Z, SEMA6A, SLC37A3, SLC2A5, SPATS2L, TMEM154, TP53INP1, TTYH2 or WNT9A, or is a portion of fragment of any of the foregoing. In some of any such embodiments, the at least one gene product selected from (a) is ADGRF1, CA6, CCL17, CCR6, ENAM, GAS6, GBP5, GLI2, IFITM1, IGJ (JCHAIN), MUC4, PON2, PTP4A3, SEMA6A, SLC37A3, SPATS2L, TMEM154, TP53INP1, IL2RA, or WNT9A or is a portion or fragment of any of the foregoing. In some of any such embodiments, the at least one gene product selected from (b) is ASAP2, FMNL2, GPR176, MDFI, PCDHGA12, PCDHGA6, PCDHGB5, PCDHGB6, PINLYP, PTCH1, ATP9A, HMX3, DPYSL3, ZNF415, IRX5, TMPRSS15, IL3RA, IGF2BP1, or TTC28 or is a portion or fragment of any of the foregoing.

[0030] In some of any such embodiments, the subject is a human and/or the one or more gene products are human. In some of any such embodiments, at least one of the one or more gene products is from (a) and at least one of the one or more gene products is from (b),In some of any such embodiments, the one or more genes comprises at least one gene from (a) that is IGJ (JCHAIN), MUC4, CA6, WNT9A, ADGRF1 or CCL17, or a portion or fragment of any of the foregoing. In some of any such embodiments, the one or more genes comprises at least one gene from (a) that is CCL17 or a portion or fragment thereof.4 In some of any such embodiments, the one or more genes comprises at least one gene from (b) that is PINLYP, ASAP2, FMNL2, PTCH1, TTC28, PCDHGA6, PCDHGB6 or PCDHGA12, or a portion or fragment of any of the foregoing. In some of any such embodiments, the one or more genes comprises at least one gene from (b) that is PINLYP or PCDHGA12 or a portion or fragment of any of the foregoing.

[0031] In some of any such embodiments: greater than or greater than about 30%, 35%, 40% , or 50% of the subjects treated according to the method do not exhibit any grade of cytokine release syndrome (CRS) or neurotoxicity; and/or at least at or about 45, 50, 60, 65, 70, 75, 80, 85, 90, 95% or about 100% of subjects treated according to the method do not exhibit severe CRS, optionally grade 3 or higher, prolonged grade 3 or higher or grade 4 or 5 CRS; and/or at least at or about 45, 50, 60, 65, 70, 75, 80, 85, 90, 95% or about 100% of subjects treated according to the method do not exhibit severe neurotoxicity, optionally grade 3 or higher, prolonged grade 3 or higher or grade 4 or 5 neurotoxicity; and/or at least at or about 45, 50, 60, 65, 70, 75, 80, 85, 90, 95% or about 100% of subjects treated according to the method do not exhibit cerebral edema.

[0032] In some of any such embodiments: prior to initiation of administration of the dose of cells, the subject has not been administered an agent or treatment capable of treating, preventing, delaying, reducing or attenuating the development or risk of development of a toxicity; and/or the subject is not administered an agent or treatment for the treatment or prevention or reduction or attenuation of a neurotoxicity and/or a cytokine release syndrome or risk thereof, within a period of time following administration of the dose, which period of time is optionally at or about 1, 2, 3, 4, 5 days or is optionally at or about 6, 7, 8, 9, 10, 11 days or is optionally 1 or 2 or 3 or 4 weeks; and/or the subject is not administered an agent or treatment for the treatment or prevention or reduction or attenuation of a neurotoxicity and/or a cytokine release syndrome or risk thereof, following administration of the dose, prior to or unless the subject exhibits a sign or symptom of the toxicity and/or prior to or unless the subject exhibits a sign or symptom of the toxicity other than a fever, optionally wherein the fever is not a sustained fever or the fever is or has been reduced or reduced by more than 1° C. after treatment with an antipyretic; and/or the administration and any follow-up is carried out on an outpatient basis and/or without admitting the subject to a hospital and/or without an overnight stay at a hospital and/or without requiring admission to or an overnight stay at a hospital, optionally unless or until the subject exhibits a sustained fever or a fever that is or has not been reduced or not reduced by more than 1° C. after treatment with an antipyretic.

[0033] In some of any such embodiments: the administration is carried out on an outpatient basis and/or without requiring admission to or an overnight stay at a hospital; and if the subject exhibits a sustained fever or a fever that is or has not been reduced or not reduced by more than 1° C. after treatment with an antipyretic, the subject is admitted to the hospital or to an overnight stay at a hospital and/or is administered an agent or treatment for the treatment or prevention or reduction or attenuation of a neurotoxicity and/or a cytokine release syndrome or risk thereof.

[0034] In some of any such embodiments, the neurotoxicity comprises severe neurotoxicity, optionally at or above grade 4 or grade 5 or at least prolonged grade 3 neurotoxicity. In some of any such embodiments, the neurotoxicity is associated with cerebral edema. In some of any such embodiments, the sample is a tumor sample and/or the sample comprises or is likely to comprise tumor cells. In some of any such embodiments, the sample is or comprises a bone marrow sample, blood sample, plasma sample, or serum sample. In some of any such embodiments, the sample is or comprises a bone marrow sample. In some of any such embodiments, is or comprises a bone marrow aspirate. In some of any such embodiments, the presence, absence or level of expression of one, two, three, four, five, six, seven, eight, nine, ten or more gene products is assessed or compared. In some of any such embodiments, the one or more gene products or portion or fragment thereof is a polynucleotide or a portion thereof. In some of any such embodiments, the polynucleotide is an RNA. In some of any such embodiments, the one or more gene products or portions thereof is a messenger RNA (mRNA) transcript or a partial transcript thereof.

[0035] In some of any such embodiments, the one or more gene products is assessed from complementary DNA (cDNA), optionally based on the mRNA transcript or partial transcript thereof. In some of any such embodiments, the cDNA is prepared by PCR amplification, optionally by RT-PCR or quantitative PCR, of the mRNA transcript or partial transcript thereof. In some of any such embodiments, the presence, absence or level of expression of the one or more gene products or portions thereof is assessed by polymerase chain reaction (PCR), northern blotting, microarray, and/or a sequencing technique.

[0036] In some of any such embodiments, the one or more gene products or portions thereof comprise a protein or a portion thereof. In some embodiments, the one or more gene products is a gene product selected from CCL17, ENG, SELE, ICAM3, or IL6R. In some of any such embodiments, the presence, absence or level of expression of the one or more gene products or portions thereof is measured by an immunoassay, nucleic acid-based or protein-based aptamer techniques, high precision liquid chromatography (HPLC), peptide sequencing, and/or mass spectrometry. In some aspects, the methods include an immunoassay-based method, such as an immunoassay performed on the Meso Scale Development (MSD) or Luminex platforms.

[0037] In some of any such embodiments, the presence, absence or level of the one or more gene products or portions thereof is measured by immunoassay and the immunoassay is selected from enzyme-linked immunosorbent assay (ELISA), enzyme immunoassay (EIA), radioimmunoassay (RIA), surface plasmon resonance (SPR), Western Blot, Lateral flow assay, immunohistochemistry, protein array or immuno-PCR iPCR). In some of any such embodiments, the gene reference value, or each of the gene reference values individually for each of the at least one or more gene product, is determined by application of an algorithm to the level, concentration or amount of expression in a control sample, or the average of such level, concentration or amount of expression among a plurality of control samples.

[0038] In some of any such embodiments, the gene reference value for the at least one gene product of (a), or each of the gene reference values individually for each of the at least one or more gene product of (a), is a value that: i) is within 25%, within 20%, within 15%, within 10%, or within 5% above the average level, concentration or amount, and/or is within a standard deviation above the average level, concentration or amount, of the at least one gene product in a plurality of control samples; ii) is above the highest level, concentration or amount of the at least one gene product, optionally within 50%, within 25%, within 20%, within 15%, within 10%, or within 5% above such highest level, concentration or amount, measured in at least one sample from among a plurality of control samples; and/or iii) is above the highest level, concentration or amount of the at least one gene product as measured among more than 75%, 80%, 85%, 90%, or 95%, or 98% of samples from a plurality of control samples; wherein the plurality of control samples are a plurality of biological samples obtained from a group of subjects prior to receiving a cell therapy for treating a disease or condition, optionally ALL, said cell therapy containing cells genetically engineered with a recombinant receptor, wherein each of the subjects of the group went on to develop severe neurotoxicity, optionally grade 3 or higher, prolonged grade 3 or higher or grade 4 or 5 neurotoxicity, after receiving the cell therapy for treating the same disease or condition.

[0039] In some of any such embodiments, the gene reference value for the at least one gene product of (a), or each of the gene reference values individually for each of the at least one or more gene product of (a), is: below the lowest level, concentration, or amount, optionally within 50%, within 25%, within 20%, within 15%, within 10%, or within 5% below the lowest level, concentration or amount, of the at least one gene product observed in a sample from among a second plurality of control samples; and/or below the level, concentration or amount of the at least one gene product measured as measured in more than 75%, 80%, 85%, 90%, 95%, or 98% of samples from among a second plurality of control samples wherein the second plurality of control samples is obtained from a group of subjects prior to receiving the same cell therapy for treating the same disease or condition, wherein each of the subjects of the group did not develop severe neurotoxicity, optionally wherein each of the subjects developed grade 3 or less, grade 2 or less, or grade 1 or 0 neurotoxicity, after receiving the cell therapy for treating the same disease or condition.

[0040] In some of any such embodiments, the gene reference value for the at least one gene product of (a), or each of the gene reference values individually for each of the at least one or more gene product of (a), is a value that: i) is within 25%, within 20%, within 15%, within 10%, or within 5% above the average level, concentration or amount, and/or is within a standard deviation above the average level, concentration or amount, of the at least one gene product in a plurality of control samples, ii) is above the highest level, concentration or amount of the at least one gene product, optionally within 50%, within 25%, within 20%, within 15%, within 10%, or within 5% above such highest level, concentration or amount, as measured in at least one sample from among a plurality of control samples; and/or iii) is above the highest level, concentration or amount of the at least one gene product measured among more than 75%, 80%, 85%, 90%, 95%, or 98% of samples from a plurality of control samples; wherein the plurality of control samples are a plurality of biological samples obtained from a group of subjects prior to receiving a cell therapy for treating a disease or condition, optionally ALL, wherein each of the subjects of the group has Philadelphia chromosome positive (PH+) or Philadelphia-like (Ph-like) subtype of ALL.

[0041] In some of any such embodiments, the gene reference value for the at least one gene product of (a), or each of the gene reference values individually for each of the at least one or more gene product of (a), is: below the lowest level, concentration, or amount, optionally within 50%, within 25%, within 20%, within 15%, within 10%, or within 5% below the lowest level, concentration or amount, of the at least one gene product observed in a sample from among a second plurality of control samples; and/or below the level, concentration or amount measured in more than 75%, 80%, 85%, 90%, 95%, or 98% of samples from among a plurality of control samples, wherein the second plurality of control samples is obtained from a group of subjects prior to receiving the same cell therapy for treating the same disease or condition, wherein each of the subjects has ALL that is not the Ph+ or Ph-like subtype of ALL.

[0042] In some of any such embodiments, the gene reference value for the at least one gene product of (b), or each of the gene reference values individually for each of the at least one or more gene product of (b), is a value that: i) is within 25%, within 20%, within 15%, within 10%, or within 5% below the average level, concentration or amount, and/or is within a standard deviation below the average level, concentration or amount, of the at least one gene product in a plurality of control samples; ii) is below the lowest level, concentration or amount of the at least one gene product, optionally within 50%, within 25%, within 20%, within 15%, within 10%, or within 5% below the lowest level, concentration or amount, as measured in at least one sample from among a plurality of control samples; iii) is below the lowest level, concentration or amount of the at least one gene product measured among more than 75%, 80%, 85%, 90%, 95%, or 98% of samples from a plurality of control samples; wherein the plurality of control samples are a plurality of biological samples obtained from a group of subjects prior to receiving a cell therapy for treating a disease or condition, said cell therapy containing cells genetically engineered with a recombinant receptor, wherein each of the subjects of the group went on to develop severe neurotoxicity, optionally grade 3 or higher, prolonged grade 3 or higher or grade 4 or 5 neurotoxicity, after receiving the cell therapy for treating the same disease or condition.

[0043] In some of any such embodiments, the gene reference value for the at least one gene product of (b), or each of the gene reference values individually for each of the at least one or more gene product of (b) is above the highest level, concentration, or amount of the at least one gene product, optionally within 50%, within 25%, within 20%, within 15%, within 10%, or within 5% above such level, concentration or amount, measured in at least one sample from among a second plurality of control samples; and/or above the level, concentration or amount of the at least one gene product measured in more than 75%, 80%, 85%, 90%, 95%, or 98% of samples from among a second plurality of control samples, wherein the second plurality of control samples are a plurality of control samples obtained from a group of subjects prior to receiving the cell therapy for treating the disease or condition, wherein each of the subjects of the group did not develop severe neurotoxicity, optionally wherein each of the subjects developed grade 3 or less, grade 2 or less, or grade 1 or 0 neurotoxicity, after receiving the cell therapy for treating the same disease or condition.

[0044] In some of any such embodiments, the gene reference value for the at least one gene product of (b), or each of the gene reference values individually for each of the at least one or more gene product of (b), is a value that: i) is within 25%, within 20%, within 15%, within 10%, or within 5% below the average level, concentration or amount, and/or is within a standard deviation below the average level, concentration or amount, of the at least one gene product in a plurality of control samples; ii) is below the lowest level, concentration or amount of the at least one gene product, optionally within 50%, within 25%, within 20%, within 15%, within 10%, or within 5% below such lowest level, concentration or amount, as measured in at least one sample from among a plurality of control samples; iii) is below the lowest level, concentration or amount of the at least one gene product measured among more than 75%, 80%, 85%, 90%, 95%, or 98% of samples from a plurality of control samples; wherein the plurality of control samples are a plurality of biological samples obtained from a group of subjects prior to receiving a cell therapy for treating a disease or condition, optionally ALL, said cell therapy containing cells genetically engineered with a recombinant receptor, wherein each of the subjects of the group has the PH+or Ph-like subtype of ALL.

[0045] In some of any such embodiments, the gene reference value for the at least one gene product of (b), or each of the gene reference values individually for each of the at least one or more gene product of (b) is: above the highest level, concentration, or amount of the at least one gene product, optionally within 50%, within 25%, within 20%, within 15%, within 10%, or within 5% above such level, concentration or amount, measured in at least one sample from among a second plurality of control samples; and/or is above the level, concentration or amount of the at least one gene product measured among more than 75%, 80%, 85%, 90%, 95%, or 98% of samples from a second plurality of control samples, wherein the second plurality of control samples are a plurality of control samples obtained from a group of subjects prior to receiving the cell therapy for treating the same disease or condition, wherein each of the subjects do not exhibit the Ph+ or Ph-like subtype of ALL.

[0046] In some of any such embodiments, the control sample or the plurality of control samples are obtained from one or more subjects who have ALL. In some of any such embodiments, the control sample or each of the plurality of control samples is from the same biological sample being assessed, optionally is a bone marrow sample. In some of any such embodiments, the plurality of control samples comprises at least 3, at least 10, at least 20, at least 50, or at least 100 control samples.

[0047] Provided herein are methods of assessing a risk of a toxicity or a toxicity-related outcome, following administration of an immunotherapy, the method including assessing the level or amount of one or more proteins or portions thereof in a biological sample from a subject that is a candidate for receiving a immunotherapy for treatment of a disease or condition, wherein the disease or condition is acute lymphoblastic leukemia (ALL) or a subtype thereof, wherein at least one of the one the one or more proteins or portions thereof are selected from CCL17, ENG, SELE, ICAM3, or IL6R; and comparing the level or amount of the one or more proteins or portions thereof to a reference value, wherein the comparison indicates the subject is or is likely at risk of developing neurotoxicity if the at least one of the one or more proteins or portions thereof is at or below the reference value; or the comparison indicates the subject is not or is likely not at risk of developing neurotoxicity if at least one of the one or more protein or portions thereof is above the reference value. In some embodiments, the biological sample is a plasma sample. In some embodiments, at least one of the one or more proteins or portions thereof is CCL17. In some embodiments, the immunotherapy is a cell therapy or is a T cell-engaging therapy, optionally wherein the cell therapy contains cells engineered to express a recombinant receptor. In some embodiments, the sample does not include the immunotherapy, and/or is obtained from the subject prior to receiving the immunotherapy.

[0048] In some embodiments, the reference value for the one or more protein or portion thereof, or each of the reference values individually for each of the one or more protein or portion thereof, is a value that is within 25%, within 20%, within 15%, within 10%, or within 5% above the average level, concentration or amount, and/or is within a standard deviation above the average level, concentration or amount, of the one or more protein or portion thereof in a plurality of control samples; is above the highest level, concentration or amount of the one or more protein or portion thereof, optionally within 50%, within 25%, within 20%, within 15%, within 10%, or within 5% above such highest level, concentration or amount, measured in at least one sample from among a plurality of control samples; and/or is above the highest level, concentration or amount of the one or more protein or portion thereof as measured among more than 75%, 80%, 85%, 90%, or 95%, or 98% of samples from a plurality of control samples; wherein the plurality of control samples are a plurality of biological samples obtained from a group of subjects prior to receiving a immunotherapy for treating ALL, wherein (1) each of the subjects of the group went on to develop severe neurotoxicity, optionally grade 3 or higher, prolonged grade 3 or higher or grade 4 or 5 neurotoxicity, after receiving the immunotherapy for treating the same disease or condition; or (2) each of the subjects of the group has ALL that is not Philadelphia chromosome positive (Ph+) or Philadelphia-like (Ph-like) subtype of ALL.

[0049] In some embodiments, the reference value for the one or more protein or portion thereof, or each of the gene reference values individually for each of the one or more protein or portion thereof, is below the lowest level, concentration, or amount, optionally within 50%, within 25%, within 20%, within 15%, within 10%, or within 5% below the lowest level, concentration or amount, of the one or more protein or portion thereof observed in a sample from among a second plurality of control samples; and/or below the level, concentration or amount of the one or more protein or portion thereof as measured in more than 75%, 80%, 85%, 90%, 95%, or 98% of samples from among a second plurality of control samples, wherein the second plurality of control samples is obtained from a group of subjects prior to receiving the same immunotherapy for treating the ALL, wherein (1) each of the subjects of the group did not develop severe neurotoxicity, optionally wherein each of the subjects developed grade 3 or less, grade 2 or less, or grade 1 or 0 neurotoxicity, after receiving the immunotherapy for treating the same disease or condition, or (2) each of the subjects has ALL that is Philadelphia chromosome positive (Ph+) or Philadelphia-like (Ph-like) subtype of ALL.

[0050] In some embodiments,the control sample or each of the plurality of control samples is the same type of biological sample being assessed from the subject, optionally is a plasma sample. In some embodiments,the plurality of control samples includes at least 3, at least 10, at least 20, at least 50, or at least 100 control samples.

[0051] In some embodiments, if the comparison indicates the subject is or is likely to develop neurotoxicity, selecting the subject for administration of a therapeutic regimen, the therapeutic regimen comprising administering to the subject an agent or other treatment capable of treating, preventing, delaying, reducing or attenuating the development or risk of development of a toxicity and the immunotherapy, wherein administration of the agent is to be administered (i) prior to, (ii) within one, two, or three days of, (iii) concurrently with and/or (iv) at first fever following, the initiation of administration of the immunotherapy to the subject; the immunotherapy at a reduced dose or at a dose that is not associated with risk of developing toxicity or severe toxicity, or is not associated with a risk of developing a toxicity or severe toxicity in a majority of subjects, and/or a majority of subjects having a disease or condition that the subject has or is suspected of having, following administration of the immunotherapy; the immunotherapy in an in-patient setting and/or with admission to the hospital for one or more days, optionally wherein the immunotherapy is otherwise to be administered to subjects on an outpatient basis or without admission to the hospital for one or more days; or an alternative therapeutic treatment other than the immunotherapy.

[0052] In some embodiments, if the comparison indicates the subject is not or is likely not at risk of developing neurotoxicity, selecting the subject for administration of a therapeutic regimen, the therapeutic regimen comprising administering to the subject the immunotherapy, optionally at a non-reduced dose, optionally on an outpatient basis or without admission to the hospital for one or more days; the immunotherapy, wherein administration of the immunotherapy does not include administering, prior to or concurrently with administering the immunotherapy and/or prior to the development of a sign or symptom of toxicity other than fever, an agent or treatment capable of treating, preventing, delaying, or attenuating the development of the toxicity; or the immunotherapy in an outpatient setting and/or without admission of the subject to the hospital overnight or for one or more consecutive days and/or is without admission of the subject to the hospital for one or more days.

[0053] In some embodiments, the method includes further administering the therapeutic regimen to the selected subject.

[0054] Provided herein are methods of assessing a risk of a toxicity or a toxicity-related outcome, following administration of an immunotherapy, the method including assessing the level or amount of one or more proteins or portions thereof in a biological sample from a subject that received an immunotherapy for treatment of a disease or condition, wherein at least one of the one the one or more proteins or portions thereof are selected from CCL27, ENG, FAS, I-309, ICAM3, NSE, P-Selectin, Resistin, S100β, Thrombomodulin or vWF; and comparing the level or amount of the one or more proteins or portions thereof to a reference value, wherein the comparison indicates the subject is or is likely at risk of developing neurotoxicity if the at least one of the one or more proteins or portions thereof is at or below the reference value; or the comparison indicates the subject is not or is likely not at risk of developing neurotoxicity if at least one of the one or more protein or portions thereof is above the reference value. In some embodiments, the biological sample is a plasma sample.

[0055] In some embodiments, the biological sample is obtained or collected from the subject no more than 4 days, no more than 3 days, no more than 2 days or no more than 1 day, after initiation of administration of the immunotherapy and/or before the subject exhibits a sign or symptom of the toxicity and/or before the subjects develops a sustained fever. In some embodiments, at least one of the one or more proteins or portions thereof is ENG or ICAM3.

[0056] In some embodiments, the immunotherapy is a cell therapy or is a T cell-engaging therapy, optionally wherein the cell therapy includes cells engineered to express a recombinant receptor.

[0057] In some embodiments, the reference value for the one or more protein or portion thereof, or each of the reference values individually for each of the one or more protein or portion thereof, is a value that is within 25%, within 20%, within 15%, within 10%, or within 5% above the average level, concentration or amount, and/or is within a standard deviation above the average level, concentration or amount, of the one or more protein or portion thereof in a plurality of control samples; is above the highest level, concentration or amount of the one or more protein or portion thereof, optionally within 50%, within 25%, within 20%, within 15%, within 10%, or within 5% above such highest level, concentration or amount, measured in at least one sample from among a plurality of control samples; and/or is above the highest level, concentration or amount of the one or more protein or portion thereof as measured among more than 75%, 80%, 85%, 90%, or 95%, or 98% of samples from a plurality of control samples; wherein the plurality of control samples are a plurality of biological samples obtained from a group of subjects after receiving a immunotherapy for treating ALL, wherein (1) each of the subjects of the group went on to develop severe neurotoxicity, optionally grade 3 or higher, prolonged grade 3 or higher or grade 4 or 5 neurotoxicity, after receiving the immunotherapy for treating the same disease or condition; or (2) each of the subjects of the group has ALL that is not Philadelphia chromosome positive (Ph+) or Philadelphia-like (Ph-like) subtype of ALL.

[0058] In some embodiments, the reference value for the one or more protein or portion thereof, or each of the gene reference values individually for each of the one or more protein or portion thereof, is below the lowest level, concentration, or amount, optionally within 50%, within 25%, within 20%, within 15%, within 10%, or within 5% below the lowest level, concentration or amount, of the one or more protein or portion thereof observed in a sample from among a second plurality of control samples; and/or below the level, concentration or amount of the one or more protein or portion thereof as measured in more than 75%, 80%, 85%, 90%, 95%, or 98% of samples from among a second plurality of control samples, wherein the second plurality of control samples is obtained from a group of subjects after receiving the same immunotherapy for treating the ALL, wherein (1) each of the subjects of the group did not develop severe neurotoxicity, optionally wherein each of the subjects developed grade 3 or less, grade 2 or less, or grade 1 or 0 neurotoxicity, after receiving the immunotherapy for treating the same disease or condition, or (2) each of the subjects has ALL that is Philadelphia chromosome positive (Ph+) or Philadelphia-like (Ph-like) subtype of ALL.

[0059] In some embodiments, the control sample or each of the plurality of control samples is the same type of biological sample being assessed from the subject, optionally is a plasma sample. In some embodiments,the control sample or each of the plurality of control samples had been obtained or collected from the subject no more than 4 days, no more than 3 days, no more than 2 days or no more than 1 day, after initiation of administration of the immunotherapy and/or before the subject exhibits a sign or symptom of the toxicity and/or before the subjects develops a sustained fever. In some embodiments, the plurality of control samples includes at least 3, at least 10, at least 20, at least 50, or at least 100 control samples.

[0060] In some embodiments, if the comparison indicates the subject is or is likely to develop neurotoxicity, administering to the subject an agent or other treatment capable of treating, preventing, delaying, reducing or attenuating the development or risk of development of a toxicity and the immunotherapy. In some embodiments, administration of the agent is to be administered within one, two, or three days of and/or at first fever following, the initiation of administration of the immunotherapy to the subject.

[0061] In some of any such embodiments, the risk or likely risk of the subject developing neurotoxicity following administration of the cell therapy is further based on the value of a parameter that indicates or correlates with the degree of recombinant receptor-dependent, optionally CAR-dependent, activity of the composition, wherein if the value of the parameter is at or greater than a threshold value the subject is at risk of developing neurotoxicity following administration of the cell therapy when administered to the subject.

[0062] In some of any such embodiments, the recombinant receptor-dependent activity comprises a measure of the production or accumulation of one or more of a proinflammatory cytokine, or a normalized value thereof. In some of any such embodiments, the proinflammatory cytokine is TNF-alpha, IFN-gamma, IL-2, IL-10, or a combination thereof. In some of any such embodiments, the measure is in an assay involving culture or incubation for a fixed time, optionally 24 hours, of cells of the cell therapy or sample thereof in the presence of an antigen that binds to the recombinant receptor, cells expressing an antigen that binds to the recombinant receptor, and/or an agent that binds to a recombinant receptor. In some of any such embodiments, the assay is an ELISA. In some of any such embodiments, the measure of the proinflammatory cytokine is: (i) a concentration, relative concentration, amount, or relative amount of the cytokine; or (ii) an amount or relative amount of the cytokine per number of cells of the therapeutic T cell composition, optionally the number of CAR+ T cells of the therapeutic T cell composition; or (iii) an amount or relative amount of the cytokine per unit of input cells of the given composition per unit of time, optionally one hour; or(iv) a level indicative of any of (i)-(iii).

[0063] In some of any such embodiments, the threshold value of the recombinant receptor-dependent activity is: i) within 25%, within 20%, within 15%, within 10%, or within 5% below the measure of the recombinant receptor-dependent activity, and/or is within a standard deviation below the such measure, in a plurality of reference compositions; ii) is below the lowest measure of the recombinant receptor-dependent activity, optionally within 50%, within 25%, within 20%, within 15%, within 10%, or within 5% below such lowest measure, in a composition from among a plurality of reference compositions; iii) is below the measure of the lowest recombinant receptor-dependent activity among more than 75%, 80%, 85%, 90%, 95%, or 98% of samples from a plurality of reference compositions; wherein the plurality of reference compositions are a plurality of compositions of the cell therapy comprising T cells expressing the recombinant receptor, optionally the CAR, from among a group of subjects that went on to receive the cell therapy for treating the same a disease or condition, optionally the same disease or condition, optionally ALL, those subjects in the group that went on to develop severe neurotoxicity, optionally grade 3 or higher, prolonged grade 3 or higher or grade 4 or 5 neurotoxicity.

[0064] In some embodiments, the immunotherapy specifically binds to an antigen associated with the disease or condition or expressed in cells of the environment of a lesion associated with the disease or condition. In some embodiments, the antigen is CD19, CD20, CD22 or CD123.

[0065] In some embodiments, the immunotherapy is a T cell-engaging therapy comprising a bispecific antibody, wherein at least one binding portion specifically binds to a T cell antigen and a second binding portion binds to the antigen associated with the disease or condition or expressed in cells of the environment of a lesion associated with the disease or condition. In some embodiments, the T cell antigen is CD3. In some embodiments, the second binding portion binds CD19. In some embodiments, the bispecific antibody is blinatumomab.

[0066] In some embodiments, the immunotherapy is a cell therapy, wherein the cell therapy includes genetically engineered cells expressing a recombinant receptor. In some embodiments, the genetically engineered cells include T cells or NK cells. In some embodiments,the engineered cells include T cells. In some embodiments, the immunotherapy is a T cell therapy comprising genetically engineered T cells expressing a recombinant receptor.

[0067] In some embodiments, the T cells include CD4+ and/or CD8+ T cells. In some embodiments, the recombinant receptor is a T cell receptor or a functional non-T cell receptor. In some embodiments, the recombinant receptor is a chimeric antigen receptor (CAR). In some embodiments, the recombinant receptor is an anti-CD19 CAR. In some embodiments, the CAR includes an extracellular antigen-recognition domain that specifically binds to the antigen and an intracellular signaling domain comprising an ITAM, wherein optionally, the intracellular signaling domain includes an intracellular domain of a CD3-zeta (CD3ζ) chain; and/or wherein the CAR further includes a costimulatory signaling region, which optionally includes a signaling domain of CD28 or 4-1BB.

[0068] In some embodiments, the risk or likely risk of the subject developing neurotoxicity following administration of the cell therapy is further based on the value of a parameter that indicates or correlates with the degree of recombinant receptor-dependent, optionally CAR-dependent, activity of the composition, wherein if the value of the parameter is at or greater than a threshold value the subject is at risk of developing neurotoxicity following administration of the immunotherapy when administered to the subject. In some embodiments, the recombinant receptor-dependent activity includes a measure of the production or accumulation of one or more of a proinflammatory cytokine, or a normalized value thereof. In some embodiments, the proinflammatory cytokine is TNF-alpha, IFN-gamma, IL-2, IL-10, or a combination thereof.

[0069] In some of any such embodiments, the recombinant receptor is any recombinant receptor described herein, optionally a CAR. In some of any such embodiments, the cell therapy comprises the administration of from or from about 1×10⁵ to 1×10⁸ total recombinant receptor-expressing cells, total T cells, or total peripheral blood mononuclear cells (PBMCs), from or from about 5×10⁵ to 1×10⁷ total recombinant receptor-expressing cells, total T cells, or total peripheral blood mononuclear cells (PBMCs) or from or from about 1×10⁶ to 1×10⁷ total recombinant receptor-expressing cells, total T cells, or total peripheral blood mononuclear cells (PBMCs), each inclusive. In some of any such embodiments, the cell therapy comprises the administration of no more than 1×10⁸ total recombinant receptor-expressing cells, total T cells, or total peripheral blood mononuclear cells (PBMCs), no more than 1×10⁷ total recombinant receptor-expressing cells, total T cells, or total peripheral blood mononuclear cells (PBMCs), no more than 0.5×10⁷ total recombinant receptor-expressing cells, total T cells, or total peripheral blood mononuclear cells (PBMCs), no more than 1×10⁶ total recombinant receptor-expressing cells, total T cells, or total peripheral blood mononuclear cells (PBMCs), no more than 0.5×10⁶ total recombinant receptor-expressing cells, total T cells, or total peripheral blood mononuclear cells (PBMCs).

[0070] In some embodiments, the immunotherapy is a cell therapy, said cell therapy comprising genetically engineered cells expressing a recombinant receptor, and the subject is administered a dose that is from or from about 2×10⁶ to 5×10⁷ total recombinant receptor-expressing cells, inclusive, or that is from or from about 2×10⁵ cells/kg to 5×10⁵ cells/kg total recombinant receptor-expressing cells, inclusive. In some embodiments, the immunotherapy is a cell therapy, said cell therapy comprising genetically engineered cells expressing a recombinant receptor, and the subject is administered a dose that is from or from about 1×10⁷ to 2.0×10⁸ total recombinant receptor-expressing cells, inclusive, or that is from or from about 1×10⁶ cells/kg to 2×10⁶ cells/kg total recombinant receptor-expressing cells, inclusive. In some embodiments, the immunotherapy is a cell therapy, said cell therapy comprising genetically engineered cells expressing a recombinant receptor, and the subject is administered a dose that is from or from about 1×10⁷ to 5×10⁷ total recombinant receptor-expressing cells, inclusive, or the subject is administered a dose that is from or from about 1×10⁶ cells/kg to 2×10⁶ cells/kg total recombinant receptor-expressing cells, inclusive. In some embodiments, the subject is an adult human subject. In some embodiments, the subject is a pediatric human subject.

[0071] Provided herein is a kit, comprising reagents for detecting the expression of two or more gene products or portions thereof in a sample, wherein the two or more gene products are encoded by two or more of ABCA9, ADAMTSL4, ADGRA2, ADGRF1, AKS, APOL1, ARHGAP27, ARID3B, CA6, CABP7, CCDC152, CCL17, CCR1, CCR6, CEP85L, CISH, CR2, CRLF2, ENAM, ENPP2, EPHA4, FTH1P11, FTH1P2, FTH1P8, GADD45A, GAS6, GBP3, GBP5, GBP6, GIMAP1-GIMAPS, GLI2, GPA33, GPRIN3, HSPA1A, IFITM1, IFITM3, IL15, IL2RA, JCHAIN, KIAA1257, LA16c-390H2.4, LAMB1, LDB3, LINC00623, LST1, LTB, LY6E, MAS1, MUC4, NLRC3, PLXNA4, PON2, PTGES3P1, PTP4A3, RNU1-1, RP11-345J4.6, RP11-421N8.1, RP11-51J9.5, RP11-51O6.1, RP11-552F3.9, RP11-686D22.9, RP11-723D22.3, RP11-723O4.6, RP13-512J5.1, RP4-620F22.2, RP5-940J5.9, RP6-109B7.5, RPL21P75, RYR2, SAMD9L, SEMA6A, SLC37A3, SNRPEP4, SOCS1, SPATS2L, SPON1, SV2C, TMEM154, TP53INP1, TNF, TRIM47, UST, WNT9A, ASAP2, ATP8B1, ATP9A, CCNA1, CDHR3, CECR2, CELF4, DLX1, DPYSL3, EHD4, FMNL2, GGA2, GPR176, HHIPL1, HOXA7, HMX3, IGF2BP1, IL3RA, IRX3, IRX5, KCNIP1, KIAA1644, LINC00092, LINC01483, MDFI, MIB1, MMP14, NOM1, OTOA, PCDHGA12, PCDHGA4, PCDHGA6, PCDHGB1, PCDHGBS, PCDHGB6, PINLYP, PPM1E, PRKD1, PROKR2, PRSS12, PRTG, PTCH1, RFX8, RP11-146B14.1, RP11-3P17.5, RP11-41O4.1, RP11-713N11.4, RP4-568B10.1, SERF1A, SEZ6L, SMURF1, TBC1D30, TCF12, TCP11, TM9SF3, TMPRSS15, TMSB15A, TNKS1BP1, TREM2, TTC28, ZNF415, ENG, SELE, ICAM3, PCDHGA9, FMNL1, or IL6R, or a portion or a fragment of any of the forgoing.

[0072] In some of any such embodiments, the two or more gene products are human gene products. In some of any such embodiments, the kit comprises reagents for detecting the expression of at least 3, at least 4, at least 5, at least 6, at least 7, at least 8, at least 9, at least 10, at least 11, at least 12, at least 13, at least 14, at least 15, at least 20, at least 25, at least 30, at least 40, or at least 50 gene products. In some of any such embodiments, the kit comprises reagents for detecting the expression of at least 3 gene products. In some of any such embodiments, the kit comprises reagents for detecting the expression of at least 5 gene products.

[0073] In some of any such embodiments, at least one of the two or more gene products is from a first group of gene products that negatively correlate to a risk of developing neurotoxicity, wherein the first group comprises gene products encoded by ABCA9, ADAMTSL4, ADGRA2, ADGRF1, AK5, APOL1, ARHGAP27, ARID3B, CA6, CABP7, CCDC152, CCL17, CCR1, CCR6, CEP85L, CISH, CR2, ENAM, ENPP2, EPHA4, FTH1P11, FTH1P2, FTH1P8, GADD45A, GAS6, GBP3, GBP5, GBP6, GIMAP1-GIMAPS, GLI2, GPA33, GPRIN3, HSPA1A, IFITM1, IFITM3, IL15, IL2RA, JCHAIN, KIAA1257, LA16c-390H2.4, LAMB1, LDB3, LINC00623, LST1, LTB, LY6E, MAS1, MUC4, NLRC3, PLXNA4, PON2, PTGES3P1, PTP4A3, RNU1-1, RP11-345J4.6, RP11-421N8.1, RP11-51J9.5, RP11-51O6.1, RP11-552F3.9, RP11-686D22.9, RP11-723D22.3, RP11-723O4.6, RP13-512J5.1, RP4-620F22.2, RP5-940J5.9, RP6-109B7.5, RPL21P75, RYR2, SAMD9L, SEMA6A, SLC37A3, SNRPEP4, SOCS1, SPATS2L, SPON1, SV2C, TMEM154, TP53INP1, TNF, TRIM47, UST, WNT9A, ENG, SELE, ICAM3, and IL6R, and portions or a fragments of any of the forgoing.

[0074] In some of any such embodiments, at least one of the two or more gene products is a gene product encoded by ADGRF1, CA6, CCL17, CCR6, ENAM, GAS6, GBP5, GLI2, IFITM1, JCHAIN, MUC4, PON2, PTP4A3, SEMA6A, SLC37A3, SPATS2L, TMEM154, TP53INP1, IL2RA, or WNT9A, or is a portion or a fragment of any of the forgoing. In some of any such embodiments, at least one of the two or more gene products is a gene product encoded by JCHAIN, MUC4, CA6, WNT9A, ADGRF1 or CCL17, or a portion or fragment of any of the foregoing. In some embodiments, at least one of the two or more gene products is a gene product encoded by CCL17, ENG, SELE, ICAM3, or IL6R, and portions or a fragments of any of the forgoing. In some of any such embodiments, at least one of the two or more gene products is a gene product encoded by CCL17 or is a portion or fragment thereof.

[0075] In some of any such embodiments, at least one of the two or more gene products is from a second group of gene products that positively correlate to a risk of developing neurotoxicity, wherein the second group comprises gene products encoded by ASAP2, ATP8B1, ATP9A, CCNA1, CDHR3, CECR2, CELF4, DLX1, DPYSL3, EHD4, FMNL2, GGA2, GPR176, HHIPL1, HOXA7, HMX3, IGF2BP1, IL3RA, IRX3, IRXS, KCNIP1, KIAA1644, LINC00092, LINC01483, MDFI, MIB1, MMP14, NOM1, OTOA, PCDHGA12, PCDHGA4, PCDHGA6, PCDHGB1, PCDHGBS, PCDHGB6, PINLYP, PPM1E, PRKD1, PROKR2, PRSS12, PRTG, PTCH1, RFX8, RP11-146B14.1, RP11-3P17.5, RP11-41O4.1, RP11-713N11.4, RP4-568B10.1, SERF1A, SEZ6L, SMURF1, TBC1D30, TCF12, TCP11, TM9SF3, TMPRSS15, TMSB15A, TNKS1BP1, TREM2, TTC28, PCDHGA9, FMNL1, and ZNF415, or portions or a fragments of any of the forgoing.

[0076] In some of any such embodiments, at least one of the two or more gene products is a gene product encoded by ASAP2, FMNL2, GPR176, MDFI, PCDHGA12, PCDHGA6, PCDHGB5, PCDHGB6, PINLYP, PTCH1, ATP9A, HMX3, DPYSL3, ZNF415, IRX5, TMPRSS15, IL3RA, IGF2BP1, or TTC28, or is a portion or fragment of any of the foregoing.

[0077] In some of any such embodiments, at least one of the two or more gene products is a gene product encoded by PINLYP, ASAP2, FMNL2, PTCH1, TTC28, PCDHGA6, PCDHGB6 or PCDHGA12, or a portion or fragment of any of the foregoing. In some of any such embodiments, at least one of the two or more gene products is a gene product encoded by PINLYP or PCDHGA12, or a portion or fragment of any of the foregoing. In some of any such embodiments, at least one of the two or more gene products is a gene product, or a portion or fragment thereof, from the first group of gene products that negatively correlate to a risk of developing neurotoxicity and at least one of the gene products is a gene product, or a portion or fragment thereof, from the second group of gene products that positively correlate to a risk of developing neurotoxicity.

[0078] In some embodiments, at least one of the two or more gene products is a gene product, or a portion or fragment thereof, from a first group of gene products that negatively correlate to a risk of developing neurotoxicity selected from CCL17, ABCA9, ADAMTSL4, ADGRA2, ADGRF1, AKS, APOL1, ARHGAP27, ARID3B, CA6, CABP7, CCDC152, CCL17, CCR1, CCR6, CEP85L, CISH, CR2, ENAM, ENPP2, EPHA4, FTH1P11, FTH1P2, FTH1P8, GADD45A, GAS6, GBP3, GBP5, GBP6, GIMAP1-GIMAPS, GLI2, GPA33, GPRIN3, HSPA1A, IFITM1, IFITM3, IL15, IL2RA, JCHAIN, KIAA1257, LA16c-390H2.4, LAMB1, LDB3, LINC00623, LST1, LTB, LY6E, MAS1, MUC4, NLRC3, PLXNA4, PON2, PTGES3P1, PTP4A3, RNU1-1, RP11-345J4.6, RP11-421N8.1, RP11-51J9.5, RP11-51O6.1, RP11-552F3.9, RP11-686D22.9, RP11-723D22.3, RP11-723O4.6, RP13-512J5.1, RP4-620F22.2, RP5-940J5.9, RP6-109B7.5, RPL21P75, RYR2, SAMD9L, SEMA6A, SLC37A3, SNRPEP4, SOCS1, SPATS2L, SPON1, SV2C, TMEM154, TP53INP1, TNF, TRIM47, UST, WNT9A, ENG, SELE, ICAM3, or IL6R, and portions or a fragments of any of the forgoing; and at least one of the gene products is a gene product, or a portion or fragment thereof, from a second group of gene products that positively correlate to a risk of developing neurotoxicity selected from ASAP2, ATP8B1, ATP9A, CCNA1, CDHR3, CECR2, CELF4, DLX1, DPYSL3, EHD4, FMNL2, GGA2, GPR176, HHIPL1, HOXA7, HMX3, IGF2BP1, IL3RA, IRX3, IRX5, KCNIP1, KIAA1644, LINC00092, LINC01483, MDFI, MIB1, MMP14, NOM1, OTOA, PCDHGA12, PCDHGA4, PCDHGA6, PCDHGB1, PCDHGB5, PCDHGB6, PINLYP, PPM1E, PRKD1, PROKR2, PRSS12, PRTG, PTCH1, RFX8, RP11-146B14.1, RP11-3P17.5, RP11-41O4.1, RP11-713N11.4, RP4-568B10.1, SERF1A, SEZ6L, SMURF1, TBC1D30, TCF12, TCP11, TM9SF3, TMPRSS15, TMSB15A, TNKS1BP1, TREM2, TTC28, PCDHGA9, FMNL1, and ZNF415, or portions or a fragments of any of the forgoing.

[0079] In some of any such embodiments, the at least one of the gene products from the first group is a gene product encoded by ADGRF1, CA6, CCL17, CCR6, ENAM, GAS6, GBP5, GLI2, IFITM1, JCHAIN, MUC4, PON2, PTP4A3, SEMA6A, SLC37A3, SPATS2L, TMEM154, TP53INP1, IL2RA, or WNT9A, or is a portion or a fragment of any of the forgoing. In some of any such embodiments, the at least one of the gene products from the first group is a gene product encoded by JCHAIN, MUC4, CA6, WNT9A, ADGRF1 or CCL17, or a portion or fragment of any of the foregoing. In some of any such embodiments, the at least one of the gene products from the first group is a gene product encoded by CCL17 or is a portion or fragment thereof.

[0080] In some of any such embodiments, the at least one of the gene products from the second group is a gene product encoded by ASAP2, FMNL2, GPR176, MDFI, PCDHGA12, PCDHGA6, PCDHGB5, PCDHGB6, PINLYP, PTCH1, ATP9A, HMX3, DPYSL3, ZNF415, IRX5, TMPRSS15, IL3RA, IGF2BP1, or TTC28, or is a portion or fragment of any of the foregoing.

[0081] In some of any such embodiments, the at least one of the gene products from the second group is a gene product encoded by ASAP2, FMNL2, GPR176, MDFI, PCDHGA12, PCDHGA6, PCDHGB5, PCDHGB6, PINLYP, PTCH1, ATP9A, HMX3, DPYSL3, ZNF415, IRX5, TMPRSS15, IL3RA, IGF2BP1, or TTC28, or is a portion or fragment of any of the foregoing.

[0082] In some of any such embodiments, the at least one of the gene products from the second group is a gene product encoded by PINLYP, ASAP2, FMNL2, PTCH1, TTC28, PCDHGA6, PCDHGB6 or PCDHGA12, or a portion or fragment of any of the foregoing.

[0083] In some of any such embodiments, the at least one of the gene products from the second group is a gene product encoded by PINLYP or PCDHGA12, or a portion or fragment of any of the foregoing. In some of any such embodiments, the at least one of the gene products from the first group is a gene product encoded by ADGRF1, CA6, CCL17, CCR6, ENAM, GAS6, GBP5, GLI2, IFITM1, JCHAIN, MUC4, PON2, PTP4A3, SEMA6A, SLC37A3, SPATS2L, TMEM154, TP53INP1, IL2RA, or WNT9A, or is a portion or a fragment of any of the forgoing; and wherein the at least one of the gene products from the second group is a gene product encoded by ASAP2, FMNL2, GPR176, MDFI, PCDHGA12, PCDHGA6, PCDHGBS, PCDHGB6, PINLYP, PTCH1, ATP9A, HMX3, DPYSL3, ZNF415, IRX5, TMPRSS15, IL3RA, IGF2BP1, or TTC28, or is a portion or fragment of any of the foregoing.

[0084] In some of any such embodiments, the at least one of the gene products from the first group is a gene product encoded by JCHAIN, MUC4, CA6, WNT9A, ADGRF1 or CCL17, or a portion or fragment of any of the foregoing; and wherein the at least one of the gene products from the second group is a gene product encoded by PINLYP, ASAP2, FMNL2, PTCH1, TTC28, PCDHGA6, PCDHGB6 or PCDHGA12, or a portion or fragment of any of the foregoing. In some of any such embodiments, the at least one of the gene products from the first group is a gene product encoded by CCL17 or is a portion or fragment thereof; and wherein the at least one of the gene products from the second group is a gene product encoded by PINLYP or PCDHGA12, or a portion or fragment thereof.

[0085] In some embodiments, the two or more gene products are or include mRNA. In some embodiments, the reagents include one or more oligonucleotide and/or polynucleotide probes that are to, bind to, and/or are capable of binding to the one or more mRNA gene products. In some embodiments, the two or more gene products are or include proteins or variants or fragments thereof.

[0086] In some embodiments, the two or more gene products are selected from CCL17, ENG, SELE, ICAM3, or IL6R, and portions or a fragments of any of the forgoing. In some embodiments, the reagents are or include antibodies or antigen binding fragments or variants thereof, wherein the antibodies or the antigen binding fragments or variants thereof bind to and/or are capable of binding to the protein gene products. In some embodiments, the kit further contains an immunotherapy. In some embodiments, the immunotherapy is a cell therapy or is a T cell-engaging therapy, optionally wherein the cell therapy includes cells engineered to express a recombinant receptor. In some embodiments, the kit is for use in connection with any of the methods provided herein.

[0087] Provided herein is an article of manufacture, comprising any of the kits provided herein, and instructions for using the reagents to assay a biological sample from a subject that is a candidate for treatment, optionally with a cell therapy, said cell therapy optionally comprising a dose or composition of genetically engineered cells expressing a recombinant receptor. In some embodiments, the instructions specify carrying out any of the methods provided herein.

[0088] In some of any such embodiments, the instructions specify assessing the presence, absence or level of expression of the two or more gene products or portions thereof in the sample, and comparing the presence, absence, or level of expression of the two or more gene products or portions thereof to gene reference values, wherein the comparison indicates the risk or likely risk of the subject developing neurotoxicity following administration of the cell therapy when administered to the subject. In some of any such embodiments, wherein the instructions specify each of the one or more gene products is individually compared to a gene reference value for the respective gene product. In some of any such embodiments, the instructions specify the sample does not comprise cells genetically engineered with the recombinant receptor and/or is obtained from the subject prior to receiving the cell therapy.

[0089] In some of any such embodiments, the instructions specify the comparison indicates the subject is or is likely at risk of developing neurotoxicity if the level of expression of the at least one gene product from the first group of gene products that negatively correlate to a risk of developing neurotoxicity is at or below a gene reference value and/or the level of expression of the at least one gene product from the second group of gene products that positively correlate to a risk of developing neurotoxicity is at or above a gene reference value; or the instructions specify the comparison indicates the subject is not or is likely not at risk of developing neurotoxicity if the level of expression of the at least one gene product of (a) is above a gene reference value and/or the level of expression of the at least one gene product of (b) is below a gene reference value.

[0090] In some of any such embodiments, the instructions specify if the comparison indicates the subject is or is likely to develop neurotoxicity, selecting the subject for administration of a therapeutic regimen, the therapeutic regimen comprising administering to the subject: i. an agent or other treatment capable of treating, preventing, delaying, reducing or attenuating the development or risk of development of a toxicity and (2) the cell therapy, wherein administration of the agent is to be administered (i) prior to, (ii) within one, two, or three days of, (iii) concurrently with and/or (iv) at first fever following, the initiation of administration of the cell therapy to the subject; ii. the cell therapy at a reduced dose or at a dose that is not associated with risk of developing toxicity or severe toxicity, or is not associated with a risk of developing a toxicity or severe toxicity in a majority of subjects, and/or a majority of subjects having a disease or condition that the subject has or is suspected of having, following administration of the cell therapy; and/or iii. the cell therapy in an in-patient setting and/or with admission to the hospital for one or more days, optionally wherein the cell therapy is otherwise to be administered to subjects on an outpatient basis or without admission to the hospital for one or more days; or iv. an alternative therapeutic treatment other than the cell therapy.

### BRIEF DESCRIPTION OF THE DRAWINGS

[0091] FIGS. 1A-1D show a volcano plot and heat maps displaying the expression levels of genes across 31 bone marrow aspirate (BMA) samples collected from subjects with acute lymphoblastic leukemia (ALL). FIG. 1A shows a volcano plot comparing gene expression in samples from subjects having grades 0 or 1 neurotoxicity with samples from subjects having grades 4 or 5 neurotoxicity. For the individual genes, the Log 2 fold change in gene expression between samples associated with grades 0-1 and 4-5 neurotoxicity (x-axis) and the −log 10 of the adjusted p value (y-axis) is plotted. FIGS. 1B-1C show heat maps displaying the expression levels of exemplary genes positively and negatively correlated to the degree of neurotoxicity (NTX) across the individual BMA samples (X axis). The neurotoxicity grade associated with each sample is shown along the X axis. The BMA samples are arranged into 3 groups: the group 1 samples show high levels of expression of genes negatively correlated to toxicity (“A” genes) and low expression of genes positively correlated to toxicity (“B” genes), the group 2 samples show high expression of genes positively correlated to neurotoxicity genes and low expression of genes negatively correlated to toxicity genes, and the Group 3 samples show mixed expression of genes negatively and positively correlated to neurotoxicity. FIG. 1D shows a heat map displaying the expression of genes negatively correlated to toxicity (“Low NTX Genes (Ph-like genes)”; “A” genes) and genes positively correlated to toxicity (“High NTX Genes” (Non Ph-like genes)”; “B” genes) for samples associated with maximum observed neurotoxicity grades of 0-1 and 4-5.

[0092] FIGS. 2A and 2B show multidimensional analyses illustrating the relationship between the expression level of genes in BMA samples taken from subjects and the in vitro antigen-stimulated TNF-alpha release of therapeutic T cell compositions that were administered to the subjects with the degree of neurotoxicity experienced by the subjects.

[0093] FIG. 2A shows a two dimensional scatter plot that depicts the expression of the PINLYP and CCL17 genes as log 2-transformed quantile-normalized FPKM (FPKQ (log 2)). The level of in vitro antigen-stimulated TNF-alpha release of the therapeutic cell composition is indicated by size of the circles marking the data points, with larger circles indicating a high degree of TNF-alpha release, and smaller circles indicating a lesser release of TNF-alpha. The numbers adjacent to the circles indicate the grade of the associated neurotoxicity experienced by the subject.

[0094] FIG. 2B shows a two dimensional scatter plot that depicts the expression levels of the PCDHGA12 and CCL17 genes, expressed as FPKQ (log 2). The level of in vitro antigen-stimulated TNF-alpha release of the therapeutic cell composition is indicated by size of the circles marking the data points, with larger circles indicating a high degree of TNF-alpha release, and smaller circles indicating a lesser release of TNF-alpha. The numbers adjacent to the circles indicate the grade of the associated neurotoxicity experienced by the subject.

[0095] FIG. 3 displays a multidimensional analyses illustrating the data presented in FIG. 2B. A two dimensional scatter plot is shown that depicts the expression level of the CCL17 gene expressed as FPKQ (log 2) and the antigen-stimulated TNF-alpha release by the therapeutic cell composition. The level of PCDHGA12 expression is indicated by size of the circles marking the data points, with larger circles indicating a high degree of PCDHGA12 expression, and smaller circles indicating a low degree of PCDHGA12 expression. The numbers adjacent to the circles indicate the grade of the associated neurotoxicity experienced by the subject.

[0096] FIG. 4 shows a heat map displaying the expression levels of exemplary Group A and Group B genes (Y axis) across 223 BMA samples collected from subject with pediatric ALL. The BCR-ABL1 status and IKZF copy number status of each sample are shown on the X axis.

[0097] FIGS. 5A and 5B show graphs displaying the levels of CCL17 detected in an immunoassay in plasma samples collected from subjects. Subjects were grouped according to the grade of neurotoxicity that developed following administration of the CAR+ T cells. FIG. 5A shows a graph displaying the concentration of CCL17 in plasma samples associated with neurotoxicity grades 0-1, 2-3, and 4-5 collected from subjects prior to administration of anti-CD19 CAR+ T cells. FIG. 5B shows a whisker plot graph displaying the levels of CCL17 in plasma samples associated with neurotoxicity grades (NTX Gr) 0-1 and 4-5 collected from subjects 1 day prior and 2, 4, and 7 days subsequent to administration of anti-CD19 CAR T cells.

[0098] FIGS. 6-8 show whisker plot graphs displaying the levels of Endoglin (FIG. 6), E-Selectin (FIG. 7) or ICAM-3 (FIG. 8), respectively, detected by an immunoassay in plasma samples (collected from subjects 1 day prior and 2, 4, and 7 days subsequent to administration of anti-CD19 CAR-T cells) in groups of subjects grouped according to grade of development of neurotoxicity (NTX Gr) (subjects developing grades 0-1 vs 4-5 neurotoxicity) following administration of the CAR+ T cells. Numbers above the X-axis indicate number of assessed subjects for each time point. Y axis shows arbitrary units of the assay signal, with higher values reflecting higher detection of the protein. Horizontal lines of the whisker plots indicate median values, and diamonds indicate mean values. Circles indicate individual data points.

[0099] FIG. 9 shows a whisker plot graph displaying the levels IL-6 receptor (IL-6R) detected by an immunoassay in plasma samples (collected from subjects 1 day prior and 2, 4, and 7 days subsequent to administration of anti-CD19 CAR-T cell) in groups of subjects grouped according to the development of neurotoxicity (subjects developing grades (Gr) 0-1 vs 4-5 neurotoxicity) following administration of the CAR+ T cells. The count (number of assessed subjects), median expression, and number of outliers for each group are listed below the X axis. The Y axis shows arbitrary units of the assay signal, with higher values reflecting higher detection of the protein. Horizontal lines of the whisker plots indicate median values, and circles represent the outliers.

[0100] FIG. 10 shows a whisker plot graph displaying the levels of CCL7, E-selectin, endoglin, ICAM3, and soluble IL-6R (sIL6R) detected by a Luminex multiplex assay in plasma samples collected from subjects prior to administration of anti-CD19 CAR-T cells in groups of subjects grouped according to the development of neurotoxicity (subjects developing grades<2 vs >2 neurotoxicity) following administration of the CAR+ T cells. The count (number of assessed subjects), median expression, and number of outliers for each group are listed below the X axis. The Y axis shows arbitrary units of the assay signal, with higher values reflecting higher detection of the protein. Horizontal lines of the whisker plots indicate median values, and circles represent the outliers. P values (Pval) of the comparisons between groups for each protein are indicated at the top of the graph.

[0101] FIG. 11 shows a graph displaying (i) for each of a number of individual subjects, individual non-boxed dots indicate maximum PK measure (number of CAR+ T cells/μl of blood (PK measure) at peak (on an individual subject-by-subject basis, the time-point at which the highest number of CAR+ T cells was measured, among the time-points at which CAR+ T cell numbers were assessed following treatment of the subject with anti-CD19 CAR-expressing T cell compositions) (with dots also indicating the highest grade of neurotoxicity observed for each subject: grade 0-2 (square), grade 3 (star), prolonged grade 3 (diamond), grade 4 (pentagon with arrow), or grade 5 (circle) neurotoxicity and (ii) median levels, for those of such patients deemed to have had an early or late CAR+ T cell peak (indicated by upper and lower lines with boxed dots with range bars, respectively) of IL-15 (picograms/mL) in serum at various indicated time points prior to and following administration of such T cell compositions. The oval indicates subjects in which early, rapid expansion of CAR-T cells was observed, as compared to other subjects.

### DETAILED DESCRIPTION

[0102] Provided herein are methods of determining, assessing, and/or measuring a risk, probability, and/or likelihood of toxicity following administration of a therapy, e.g., a cell therapy and/or an immunotherapy, that include one or more steps for measuring, assessing, determining, and/or quantifying the presence, absence, or level of expression of one or more gene products, or portions thereof in a sample and comparing the presence, absence, or level of expression of the one or more gene products or portions thereof to a gene reference value, wherein the comparison indicates the risk, probability, or likelihood of the subject developing a toxicity following administration of and/or associated with the therapy, e.g. cell therapy. Also provided herein are methods of treatment that include one or more steps of administering to a subject a dose of a therapy, e.g. a cell therapy and/or an immunotherapy, for treatment of a disease or condition following and/or based on the results of assessing the presence, absence, or level of expression, from a sample from the subject, of one or more gene products or portion thereof, wherein the assessment indicates the risk, probability, or likelihood of the subject developing a toxicity following administration of and/or associated with the therapy, e.g. cell therapy.

[0103] In particular embodiments, the one or more gene products are associated with and/or correlated to a risk, probability, and/or likelihood of developing and/or experiencing toxicity following administration of and/or associated with the therapy. In some embodiments, the sample is taken or obtained from a subject that is a candidate for receiving the therapy. In some embodiments, the sample does not contain or include the therapy, e.g., genetically engineered cells of a cell therapy. In certain embodiments, the sample does not include genetically engineered cells, e.g., genetically engineered cells from a therapy.

[0104] Also provided herein are methods of treatment including one or more steps of selecting a subject that exhibits a Philadelphia chromosome (Ph+) and/or Philadelphia chromosome-like (Ph-like) molecular subtype of acute lymphoblastic leukemia (ALL) and administering to the subject a therapy, e.g. a cell therapy and/or immunotherapy, comprising a dose of therapy for the treatment, alleviation, and/or amelioration of ALL.

[0105] Immunotherapies, such as adoptive cell therapies (including those involving the administration of cells expressing chimeric receptors specific for a disease or disorder of interest, such as chimeric antigen receptors (CARs) and/or other recombinant antigen receptors, as well as other adoptive immune cell and adoptive T cell therapies), can be effective in treating cancer and other diseases and disorders. In certain contexts, available approaches to immunotherapy, such as adoptive cell therapy, may not always be entirely satisfactory. In some aspects, the provided embodiments are based on observations that the efficacy of adoptive cell therapy may be limited in some context by the development of, or risk of developing, toxicity or one or more toxic outcomes in the subject. In some cases, such toxicities can be severe. For example, in some cases, administering a dose of cells expressing a recombinant receptor, e.g. a CAR, can result in toxicity or risk thereof, such as CRS or neurotoxicity.

[0106] Predicting the risks of adverse outcomes or toxicity associated with the administration of a therapy, e.g., an immunotherapy such as a cell therapy, in individual subjects is useful for evaluating, monitoring, and/or tailoring current or potential therapies for individual subjects, particularly in the context of minimizing potential life-threatening side effects (e.g. cytokine release syndrome or severe neurotoxicity). In some aspects, the methods provided herein may be used to minimize, mitigate, and/or avoid the risk of toxicity and other such undesirable outcomes of a therapy, e.g. an immunotherapy such as a cell therapy or CAR-T cell therapy.

[0107] In some embodiments, the methods provided herein contain one or more steps of determining the gene signatures in a sample, e.g., a bone marrow aspirate sample or a serum sample, by assessing one or more specific genes products as provided herein in order to predict or assess the degree of a risk for toxicity associated with a therapy in subjects. In certain embodiments, the one or more specific gene products are from among two sets of genes: (1) genes identified as having high expression in low-risk subjects (e.g. grade 0-2 neurotoxicity) and low expression in high-risk subjects (e.g. severe neurotoxicity, such as grade 3 or higher, for example grade 4 or 5 neurotoxicity), and/or (2) genes identified as having high expression in high-risk subjects and low expression in low-risk subjects. In some embodiments, the gene signatures combining the expression of two or more gene products from one or both sets of genes are useful for predicting the degree of the risk, probability, or likelihood of a toxicity, for example severe neurotoxicity. In some embodiments, high-risk neurotoxicity is or is characterized by grade 4 or 5 neurotoxicity or is severe neurotoxicity. In particular embodiments, the therapy is an immunotherapy and/or a cell therapy, such as a CAR-T cell therapy. In certain embodiments, the analysis of the gene signature in the sample may be combined with measurements of a parameter of the therapy, such as an activity readout of engineered T cells of a CAR-T cell therapy, e.g., TNF-alpha secretion by cells of a cell therapy, to access the risk of toxicity in individual subjects in a manner that is strongly predictive.

[0108] In certain embodiments, the methods provided herein assess the gene signatures of the sample collected prior to any administration of the therapy. Thus, in such embodiments, the sample does not contain the therapy and has not been affected by or exposed to the therapy. The sample may contain tumor or cancer cells, or may contain gene products that are released or secreted by tumor cells. Thus, in certain embodiments, the methods provided herein provide an assessment and/or determination of the subject's risk to a toxicity associated with a therapy based on properties that are intrinsic to the subject and/or the subject's disease. Without being bound by theory, the predictive nature of the gene signatures provided herein may suggest that toxicity, e.g., neurotoxicity, results from an interaction or relationship between the disease or cancer and the therapy, e.g., the CAR-T cell therapy.

[0109] In particular embodiments, provided herein are methods for assessing the risk of a subject for toxicity following administration of a therapy, e.g., an immunotherapy and/or a cell therapy, by assessing, measuring, determining, and/or quantifying the gene signature and/or the expression of one or more genes or gene products that are associated with and/or correlate to toxicity in a sample. In certain embodiments, the sample is taken and/or obtained from the subject prior to any treatment or administration of the therapy, e.g. a cell therapy. Thus, in some embodiments, the gene signature, e.g., the expression of the one or more genes or gene products in the sample, is not a response to the therapy but reflects a preexisting disposition of the subject and/or of the particular strain of the subjects' cancer to the therapy. In some embodiments, an advantage of the methods provided herein is that a subject at risk for toxicity may be identified before the therapy is administered, so that the subject may be assigned close monitoring during and following treatment of the therapy, receive treatment of the therapy in a hospital setting, and/or in some embodiments may receive an intervention that prevents, treats, and/or ameliorates toxicity prior to receiving the therapy or before any symptoms of a toxicity are present. In certain embodiments, the at risk subject may be selected to receive a low dose of the therapy, or in some cases, to receive an alternative therapy. In some embodiments, the alternative therapy is a therapy that treats the disease or condition other than the immunotherapy, e.g. cell therapy, for treating the disease or condition.

[0110] In certain embodiments, the risk, probability, and/or likelihood of toxicity following administration of or associated with the therapy is assessed in a subject with minimal invasiveness by utilizing samples, such as bone marrow aspirates and/or tumor samples or serum samples, that are collected at a screening session, such as a routine biopsy or blood draw to confirm and/or identify the condition or disease in the subject. For example, in some embodiments, a bone marrow sample is collected or obtained from a subject having or suspecting of having a leukemia, such as ALL, at an initial screening, such as when a treatment regimen is still being planned or considered. Thus, in some embodiments, the methods provided herein allow for the risk of toxicity following administration of a therapy to be assessed in a subject without the need for additional procedures, e.g., additional biopsies, beyond the normal procedures leading up to the therapy.

[0111] In particular embodiments, provided herein are the identities of genes with expression that is negatively or positively correlated to and/or associated with a risk of developing a toxicity following administration of a therapy, e.g., an immunotherapy and/or a cell therapy. For example, in some embodiments, provided herein are genes that have been identified through gene expression analysis, e.g., RNA-seq analysis, of samples obtained from subjects in a study, e.g., a clinical study, prior to treatment with the therapy and analyzed for a correlation to the incidence and/or the degree of toxicity experienced by the subjects during the study. In some embodiments, further analysis has demonstrated that the expression of one or more genes identified herein can be analyzed in samples taken from subjects prior to a therapy, such as a cell therapy, to accurately predict the risk of toxicity following administration of the therapy, e.g. a cell therapy. In particular aspects as described, at least one of the one or more gene products is selected from a gene listed in Table 1 or Table E2A and/or at least one of the one or more of the gene products is selected from a gene listed in Table 2 or Table E2B (e.g. a subset of genes in the relevant Table which as a recited SEQ ID NO, and/or a Uniprot ID). In some embodiments, the presence, absence, or level of expression of the one or more gene products are compared to reference values of the one or more gene products.

[0112] In certain embodiments, the gene signature of the sample may reflect and/or identify a molecular or genetic subtype of the subject's disease or cancer. In some embodiments, some or all of the gene signatures provided herein of bone marrow or blood samples obtained from subjects with ALL may reflect and/or identify a molecular or genetic subtype of the subject's ALL. For example, in some embodiments, it is found herein that the high expression of certain genes that negatively correlate to the degree and/or risk of neurotoxicity following administration of a therapy, e.g., an immunotherapy and/or a cell therapy, have been identified in bone marrow and peripheral blood samples as components of a genetic signature for a subtype of ALL, e.g., a molecular subtype, such as an ALL subtype termed “Ph-like” or “BCR-ABL-like” (Harvey et al., Blood 122: 826 (2013); PCT App. No. PCT/US2012/069228) and an ALL subtype termed “R8” (Harvey et al., Blood 116(23): 4874-4884 (2010)). Thus, in some embodiments, the gene signatures associated with a high or low risk of toxicity following administration of a therapy may, at least in some cases, identify distinct subtypes and/or populations of ALL.

[0113] In particular embodiments, provided herein are molecular subtypes of ALL and/or B-ALL that are negatively or positively correlated to and/or associated with a risk of developing a toxicity following administration of a therapy, e.g., an immunotherapy and/or a cell therapy. For example, in some embodiments, provided herein are molecular subtypes of ALL that were identified in samples obtained from subjects in a study, e.g., a clinical study, prior to treatment with the therapy and analyzed for a correlation to the incidence and/or the degree of toxicity experienced by the subjects during the study. In certain embodiments, subjects that are identified as Ph+ and/or Ph-like have a lower risk of developing toxicity, e.g., neurotoxicity, than non Ph− and/or Ph-like subjects. Thus, in some embodiments, identification of a subject's molecular subtype or gene expression signature of All and/or B-ALL is used to assess the risk and/or probability for experiencing a toxicity associated with a cell therapy, such as an anti-CD19 CAR T cell therapy.

[0114] In some embodiments, information obtained from the gene signature of a sample from a subject may be combined with other assessments and/or measurements to accurately (or more accurately) assess or determine the risk of a subject for developing a toxicity following administration of a therapy, e.g., a cell therapy and/or an immunotherapy. In particular embodiments, the gene signature of the sample may be analyzed in conjunction with one or more parameters of the cells of a cell therapy. In some embodiments, a parameter of the therapy may be assessed in conjunction with the gene signatures to determine if and/or the dose that the therapy may be administered to the subject, for example to minimize or further reduce the risk, probability or likelihood that the subject will experience toxicity following administration of and/or associated with the therapy. For example, in some embodiments, one or more parameters of the cells of the cell therapy that relate to cellular activity and/or immune function are measured and combined in the analysis of the gene signature to assess or determine a subjects risk for developing a toxicity following administration of the therapy. In particular embodiments, therapy contains cells expressing a recombinant receptor, e.g., a CAR, and the parameter relates to recombinant receptor-dependent cellular activity and/or immune function of the therapy. In some embodiments, the combined analysis of the gene signature and the parameter might increase the accuracy and/or the predictive power of the assessment for toxicity as opposed to an analysis of either the gene signature or the parameter alone.

[0115] In all of the provided embodiments, a preferred immunotherapy is CAR-T cell therapy targeting an antigen associated with ALL, and the disease or condition to be treated is ALL. In such preferred embodiments, the CAR-T cell therapy is targets CD19, CD20, CD22 or CD23. In some embodiments of a preferred embodiment, the CAR-T cell therapy is an anti-CD19 CAR-T cell therapy.

[0116] All publications, including patent documents, scientific articles and databases, referred to in this application are incorporated by reference in their entirety for all purposes to the same extent as if each individual publication were individually incorporated by reference. If a definition set forth herein is contrary to or otherwise inconsistent with a definition set forth in the patents, applications, published applications and other publications that are herein incorporated by reference, the definition set forth herein prevails over the definition that is incorporated herein by reference.

[0117] The section headings used herein are for organizational purposes only and are not to be construed as limiting the subject matter described.

### I. METHODS OF ASSESSING RISK TOXICITY

[0118] In particular embodiments, provided herein are methods to assess, predict, infer, and/or estimate a risk of toxicity, for example to a therapy such as an immunotherapy or cell therapy. In some embodiments, the subject is administered, will be administered, or is a candidate to be administered a therapy, e.g., an immunotherapy and/or a cell therapy. In some embodiments, the toxicity is a toxicity following administration of the therapeutic treatment. In certain embodiments, the toxicity is triggered, caused, and/or associated with a therapy. In particular embodiments, methods for the assessment, prediction, inference, and/or estimate of the risk or probability include one or more steps for measuring, assessing, and/or determining the expression products of one or more genes (hereinafter one or more “gene products”), e.g., a gene expression profile. In certain embodiments, the expression of the one or more gene products is predictive of, correlated with, and/or associated with a risk of toxicity following administration of therapy, e.g., the immunotherapy and/or the cell therapy. In certain embodiments, the expression of one or more gene products is measured in a sample, e.g., a sample taken, collected, and/or obtained from the subject.

[0119] Particular embodiments contemplate that the expression of one or more gene products, e.g., a gene expression profile, of a sample is predictive of, correlated with, and/or associated with a risk, e.g., a high risk or a low risk, of toxicity, e.g., toxicity following administration of or associated with a therapy. In some embodiments, the gene expression profile of a sample is or includes the expression the one or more gene products that are correlated with and/or associated with a risk and/or an incidence of a toxicity. In certain embodiments, the gene expression profile of a sample is or includes the expression of one or more gene products that are negatively correlated with and/or negatively associated with a risk and/or an incidence of a particular grade or grades of a toxicity, e.g. a severe toxicity such as grade 4 and/or grade 5 neurotoxicity. In certain embodiments, the gene expression profile of a sample is or includes the expression of one or more gene products that are negatively correlated with and/or negatively associated with a risk and/or an incidence of a toxicity. In particular embodiments, the gene expression profile of a sample is or includes the expression of one or more gene products that are positively correlated with and/or positively associated with a risk and/or an incidence of a toxicity. In particular embodiments, the gene expression profile of a sample is or includes the expression of one or more gene products that are positively correlated with and/or positively associated with an incidence of a particular grade or grades of a low-risk toxicity, e.g. grade 0 or grade 1 neurotoxicity. In particular embodiments, the gene expression profile of a sample is or includes the expression of one or more gene products that are positively correlated with and/or positively associated with a risk and/or an incidence of a particular grade or grades of high-risk toxicity, e.g. a severe toxicity such as grade 4 or grade 5 neurotoxicity. In certain embodiments the toxicity is to and/or associated with a cell therapy. In particular embodiments, the toxicity is to and/or associated with an immunotherapy.

[0120] In particular embodiments, the methods to assess, predict, infer, and/or estimate a risk of toxicity, for example to a therapy such as an immunotherapy, include one or more steps of assessing a gene expression profile in a sample. In some embodiments, the one or more steps include comparing the expression of one or more gene products of the gene expression profile to one or more gene reference values. In certain embodiments, comparing the expression of one or more gene products from the gene expression profile with the one or more reference values indicates the risk, probability, and/or likelihood that a subject will experience a toxicity following administration of the therapy. In some embodiments, the sample is obtained from a subject that is administered, will be administered, or is a candidate to be administered a therapy, e.g., an immunotherapy and/or a cell therapy. In particular embodiments, the methods to assess, predict, infer, and/or estimate a risk of toxicity, include one or more steps for taking, collecting, and/or obtaining a sample from a subject; detecting, measuring, and/or obtaining a gene expression profile of the sample; and/or comparing the expression of one or more gene products of the gene expression profile to determine, estimate, or predict the risk or likelihood of toxicity.

[0121] A. Sample

[0122] In certain embodiments, the expression of one or more gene products are measured, assessed, and/or determined in a sample. In particular embodiments, the sample is a biological sample that is taken, collected, and/or obtained from a subject. In certain embodiments, the subject has a disease or condition and/or is suspected of having a disease or condition. In some embodiments, subject has received, will receive, or is a candidate to receive a therapy. In some embodiments, the therapy is an administration of a cell therapy. In particular embodiments, the therapy is an immunotherapy. In certain embodiments, the cell therapy treats and/or is capable of treating the disease or condition. In some embodiments, the therapy is a cell therapy that contains one or more engineered cells. In some embodiments, the engineered cells express a recombinant receptor. In particular embodiments, the recombinant receptor is a chimeric antigen receptor (CAR). In particular embodiments, the sample is taken, collected, and/or obtained from a subject who has been, who will be, or is a candidate to be administered a therapy. In particular embodiments, the sample is taken, collected, and/or obtained prior to treatment or administration with the therapy, e.g., the cell therapy.

[0123] In particular embodiments, the sample is taken, collected, and/or obtained from a subject who has been, who will be, or is a candidate to be administered a therapy. In particular embodiments, the sample is taken, collected, and/or obtained prior to treatment or administration with the therapy, e.g., the cell therapy. In accord with methods, kits and articles of manufacture described herein, the sample can be assessed for one or more gene products that is associated with and/or correlate to toxicity or risk of toxicity. Exemplary gene products that are associated with and/or correlated with a risk of developing toxicity based on expression in a sample collected or obtained from a subject prior to receiving an immunotherapy are described in Section I.B and/or Table 1, Table E2A, Table 2 or Table E2B (e.g. a subset of these genes in the relevant Table which has a recited SEQ ID NO, and/or a Uniprot ID). Thus, in some aspects, the provided methods relate to identifying subjects, prior to receiving an immunotherapy, such as a cell therapy (e.g. CAR-T cells), who may be at risk of developing a toxicity, e.g. neurotoxicity, such as grade 3 or higher or grade 4 or 5. As described elsewhere herein, the methods can be used to determine if the subject should be closely monitored following the administration of the immunotherapy, is a candidate for outpatient therapy or should receive treatment of the therapy in a hospital setting and/or is a candidate for receiving an intervention of preventing, treating or ameliorating a risk of a toxicity.

[0124] In some embodiments, the sample is taken, collected, and/or obtained subsequent to treatment or administration with the therapy, e.g., the cell therapy. In accord with methods, kits and articles of manufacture described herein, the sample can be assessed for one or more gene products that are associated with and/or correlate to toxicity or risk of toxicity after receiving the immunotherapy. Exemplary gene products that are associated with and/or correlated with a risk of developing toxicity based on expression in a sample collected or obtained from a subject subsequent to receiving an immunotherapy are described in Table E10. In some embodiments, the sample is collected within or about within or about 30 minutes, 1 hours, 2 hours, 3 hours, 4 hours, 5 hours, 6 hours, 8 hours, 10 hours, 12 hours, 14 hours or more following initiation of administration of the immunotherapy, e.g. the cell therapy. In some aspects, the sample is collected prior to the subject exhibiting a sign or symptom of a toxicity following administration of the immunotherapy, e.g. cell therapy, such as severe CRS or grade 3 CRS or greater, e.g. grade 4 or 5 CRS, and/or severe neurotoxicity or grade 3 neurotoxicity or greater, e.g. grade 4 or 5 neurotoxicity. In some embodiments, the sample is collected from the subject at a time in which the subject exhibits grade 2 or lower CRS, e.g. grade 0 or grade 1 CRS, and/or grade 2 or lower neurotoxicity, e.g. grade 0 or grade 2 neurotoxicity following administration of the immunotherapy, e.g. cell therapy. In some embodiments, the sample is collected prior to the subject developing a first sustained fever following administration of the cell therapy, e.g. immunotherapy, or at a time in which is within 1 hours, 2 hours, 3 hours, 4 hours, 5 hours, 6 hours, 7 hours, 8 hours, 9 hours, 10 hours, 12 hours, 18 hours or 24 hours of a fever, such as a sustained fever, that develops following administration of the immunotherapy, e.g. cell therapy.

[0125] In some embodiments, the fever in the subject is characterized as a body temperature of the subject that is (or is measured at) at or above a certain threshold temperature or level. In some aspects, the threshold temperature is that associated with at least a low-grade fever, with at least a moderate fever, and/or with at least a high-grade fever. In some embodiments, the threshold temperature is a particular temperature or range. For example, the threshold temperature may be at or about or at least at or about 38, 39, 40, 41, or 42 degrees Celsius, and/or may be a range of at or about 38 degrees Celsius to at or about 39 degrees Celsius, a range of at or about 39 degrees Celsius to at or about 40 degrees Celsius, a range of at or about 40 degrees Celsius to at or about 41 degrees, or a range of at or about 41 degrees Celsius to at or about 42 degrees Celsius.

[0126] In some embodiments, the subject has, and/or is determined to or considered to have, a sustained fever if he or she exhibits a fever at or above the relevant threshold temperature, and where the fever or body temperature of the subject does not fluctuate by about, or by more than about, 1° C., and generally does not fluctuate by about, or by more than about, 0.5° C., 0.4° C., 0.3° C., or 0.2° C. Such absence of fluctuation above or at a certain amount generally is measured over a given period of time (such as over a 24-hour, 12-hour, 8-hour, 6-hour, 3-hour, or 1-hour period of time, which may be measured from the first sign of fever or the first temperature above the indicated threshold). For example, in some embodiments, a subject is considered to or is determined to exhibit sustained fever if he or she exhibits a fever of at least at or about or at least at or about 38 or 39 degrees Celsius, which does not fluctuate in temperature by more than at or about 0.5° C., 0.4° C., 0.3° C., or 0.2° C., over a period of 6 hours, over a period of 8 hours, or over a period of 12 hours, or over a period of 24 hours.

[0127] In some embodiments, the subject has, and/or is determined to or considered to have, a sustained fever if he or she exhibits a fever at or above the relevant threshold temperature, and where the fever or body temperature of the subject is not reduced, or is not reduced by or by more than a specified amount (e.g., by more than 1° C., and generally does not fluctuate by about, or by more than about, 0.5° C., 0.4° C., 0.3° C., or 0.2° C.), following a specified treatment, such as a treatment designed to reduce fever such as treatment with an antipyretic. An antipyretic may include any agent, e.g., compound, composition, or ingredient, that reduces fever, such as one of any number of agents known to have antipyretic effects, such as NSAIDs (such as ibuprofen, naproxen, ketoprofen, and nimesulide), salicylates, such as aspirin, choline salicylate, magnesium salicylate, and sodium salicylate, paracetamol, acetaminophen, Metamizole, Nabumetone, Phenaxone, antipyrine, febrifuges. In some embodiments, the antipyretic is acetaminophen. In some embodiments, acetaminophen can be administered at a dose of 12.5 mg/kg orally or intravenously up to every four hours. In some embodiments, it is or comprises ibuprofen or aspirin. For example, a subject is considered to have a sustained fever if he or she exhibits or is determined to exhibit a fever of at least at or about 38 or 39 degrees Celsius, which is not reduced by or is not reduced by more than at or about 0.5° C., 0.4° C., 0.3° C., or 0.2° C., or by at or about 1%, 2%, 3%, 4%, or 5%, over a period of 6 hours, over a period of 8 hours, or over a period of 12 hours, or over a period of 24 hours, even following treatment with the antipyretic such as acetaminophen. In some embodiments, the dosage of the antipyretic is a dosage ordinarily effective in such as subject to reduce fever or fever of a particular type such as fever associated with a bacterial or viral infection, e.g., a localized or systemic infection.

[0128] In some embodiments, the sample is taken, collected, and/or obtained from a subject that has or is suspected of having a condition or disease. In some embodiments, the subject has or is suspected of having a cancer or proliferative disease. In particular embodiments, the subject has a disease or condition, or is suspected of having a disease or condition, that is associated with an antigen and/or is associated with diseased cells that express the antigen. In some embodiments, the disease or condition, e.g., a cancer or proliferative disorder, is associated with αvβ6 integrin (avb6 integrin), B cell maturation antigen (BCMA), B7-H3, B7-H6, carbonic anhydrase 9 (CA9, also known as CAIX or G250), a cancer-testis antigen, cancer/testis antigen 1B (CTAG, also known as NY-ESO-1 and LAGE-2), carcinoembryonic antigen (CEA), a cyclin, cyclin A2, C-C Motif Chemokine Ligand 1 (CCL-1), CD19, CD20, CD22, CD23, CD24, CD30, CD33, CD38, CD44, CD44v6, CD44v7/8, CD123, CD133, CD138, CD171, chondroitin sulfate proteoglycan 4 (CSPG4) epidermal growth factor protein (EGFR), type III epidermal growth factor receptor mutation (EGFR vIII), epithelial glycoprotein 2 (EPG-2), epithelial glycoprotein 40 (EPG-40), ephrinB2, ephrine receptor A2 (EPHa2), estrogen receptor, Fc receptor like 5 (FCRL5; also known as Fc receptor homolog 5 or FCRH5), fetal acetylcholine receptor (fetal AchR), a folate binding protein (FBP), folate receptor alpha, ganglioside GD2, O-acetylated GD2 (OGD2), ganglioside GD3, glycoprotein 100 (gp100), glypican-3 (GPC3), G Protein Coupled Receptor 5D (GPRC5D), Her2/neu (receptor tyrosine kinase erbB2), Her3 (erb-B3), Her4 (erb-B4), erbB dimers, human high molecular weight-melanoma-associated antigen (HMW-MAA), hepatitis B surface antigen, Human leukocyte antigen Al (HLA-A1), human leukocyte antigen A2 (HLA-A2), IL-22 receptor alpha(IL-22Ra), IL-13 receptor alpha 2 (IL-13Rα2), kinase insert domain receptor (kdr), kappa light chain, L1 cell adhesion molecule (L1CAM), CE7 epitope of L1-CAM, Leucine Rich Repeat Containing 8 Family Member A (LRRC8A), Lewis Y, melanoma-associated antigen (MAGE)-A1, MAGE-A3, MAGE-A6,MAGE-A10, mesothelin (MSLN), c-Met, murine cytomegalovirus (CMV), mucin 1 (MUC1), MUC16, natural killer group 2 member D (NKG2D) ligands, melan A (MART-1), neural cell adhesion molecule (NCAM), oncofetal antigen, preferentially expressed antigen of melanoma (PRAME), progesterone receptor, a prostate specific antigen, prostate stem cell antigen (PSCA), prostate specific membrane antigen (PSMA), receptor tyrosine kinase like orphan receptor 1 (ROR1), survivin, Trophoblast glycoprotein (TPBG also known as 5T4), tumor-associated glycoprotein 72 (TAG72), Tyrosinase related protein 1 (TRP1, also known as TYRP1 or gp75), Tyrosinase related protein 2 (TRP2, also known as dopachrome tautomerase, dopachrome delta-isomerase or DCT), vascular endothelial growth factor receptor (VEGFR), vascular endothelial growth factor receptor 2 (VEGFR2), Wilms tumor 1 (WT-1), and/or a pathogen-specific or pathogen expressed antigen. In some embodiments, the antigen is a viral antigen (such as a viral antigen from HIV, HCV, HBV, etc.), bacterial antigens, and/or parasitic antigens. In certain embodiments, the subject has a disease or condition, or is suspected of having a disease or condition, that is associated with CD19 and/or is associated with diseased cells that express CD19.

[0129] In some embodiments, the sample is taken, collected, and/or obtained from a subject that has or is suspected of having a cancer or proliferative disease that is a B cell malignancy or hematological malignancy. In some embodiments, the cancer or proliferative disease is a myeloma, e.g., a multiple myeloma (MM), a lymphoma or a leukemia, lymphoblastic leukemia (ALL), non-Hodgkin's lymphoma (NHL), chronic lymphocytic leukemia (CLL), a diffuse large B-cell lymphoma (DLBCL), and/or acute myeloid leukemia (AML). In some embodiments, the cancer or proliferative disorder is ALL. In some embodiments, the subject has, or is suspected of having ALL. In some embodiments, the ALL is adult ALL. In particular embodiments, the ALL is pediatric ALL.

[0130] In certain embodiments, the sample is a biological sample. In certain embodiments, the sample is a tissue sample. In particular embodiments, the sample is or includes a tissue affected, or suspected of being affected, by a disease or condition. In some embodiments, the sample is or includes a tissue affected, or suspected of being affected by a cancer or a proliferative disease. In some embodiments, the sample is a biopsy.

[0131] In certain embodiments, the sample is collected from a tissue having or suspected of having a tumor. In particular embodiments, the sample is or includes a tumor and/or a tumor microenvironment. In particular embodiments, the tumor is precancerous or cancerous, or is suspected of being cancerous or precancerous. In certain embodiments, the tumor is a primary tumor, i.e., the tumor is found at the anatomical site where the lesion initially developed or appeared. In some embodiments, the tumor is a secondary tumor, e.g., a cancerous tumor that originated from a cell within a primary tumor located within a different site in the body. In some embodiments, the sample contains one or more cells that are cancer cells and/or tumor cells.

[0132] In particular embodiments, the sample is collected from a lesion and/or a tumor that is associated with or caused by, or is suspected of being associated with or caused by, a non-hematologic cancer, e.g., a solid tumor. In some embodiments, the tumor is associated with or caused by, or is suspected of being associated with or caused by, a bladder, a lung, a brain, a melanoma (e.g. small-cell lung, melanoma), a breast, a cervical, an ovarian, a colorectal, a pancreatic, an endometrial, an esophageal, a kidney, a liver, a prostate, a skin, a thyroid, or a uterine cancer. In some embodiments, the lesion is associated with or caused by a pancreatic cancer, bladder cancer, colorectal cancer, breast cancer, prostate cancer, renal cancer, hepatocellular cancer, lung cancer, ovarian cancer, cervical cancer, pancreatic cancer, rectal cancer, thyroid cancer, uterine cancer, gastric cancer, esophageal cancer, head and neck cancer, melanoma, neuroendocrine cancers, CNS cancers, brain tumors, bone cancer, or soft tissue sarcoma. In certain embodiments, the sample contains one or more cancer cells. In some embodiments, the sample contains one or more cells that are suspected of being cancerous.

[0133] In some embodiments, the sample is collected from a lesion or tumor that is associated with or caused by a B cell malignancy or hematological malignancy. In some embodiments, the lesion or tumor is associated with a myeloma, e.g., a multiple myeloma (MM), a lymphoma or a leukemia, lymphoblastic leukemia (ALL), non-Hodgkin's lymphoma (NHL), chronic lymphocytic leukemia (CLL), a diffuse large B-cell lymphoma (DLBCL), and/or acute myeloid leukemia (AML). In some embodiments, the lesion or tumor is associated with or caused by ALL, e.g., adult ALL or pediatric ALL.

[0134] In some embodiments, the sample is a tissue sample, e.g., a tissue biopsy. In particular embodiments, the sample is obtained, collected, or taken from connective tissue, muscle tissue, nervous tissue, or epithelial tissue. In certain embodiments, the lesion is present on the heart, vasculature, salivary glands, esophagus, stomach, liver, gallbladder, pancreas, intestines, colon, rectum, hypothalamus, pituitary gland, pineal gland, thyroid, parathyroid, adrenal gland, kidney, ureter, bladder, urethra, lymphatic system, skin, muscle, brain, spinal cord, nerves, ovaries, uterus, testes, prostate, pharynx, larynx, trachea, bronchi, lungs, diaphragm, bone, cartilage, ligaments, or tendons. In particular embodiments, the sample is obtained, collected, or taken from bone marrow. In some embodiments, the sample is a bone marrow aspirate.

[0135] In some embodiments, the sample is a body fluid from the subject. In some embodiments, the sample is a blood, serum, plasma or urine sample. In some embodiments, the sample is a plasma sample.

[0136] In particular embodiments, the sample does not contain the therapy, e.g., the immunotherapy and/or the cell therapy. In particular embodiments, the sample does not contain any cells, e.g., engineered cells, of a cell therapy. In particular embodiments, the therapy is a T cell therapy and the sample does not contain any engineered T cells and/or any T cells of the therapy. In particular embodiments, the sample does not contain any engineered cells that express a recombinant receptor, e.g., a CAR. In some embodiments, the sample does not contain cells expressing a CAR. In certain embodiments, the sample does not contain any therapy or components of a therapy described herein, such as in Section II-A, Section II-B, or Section III-B.

[0137] In any of the provided embodiments, the sample is a bone marrow aspirate from a subject with ALL, or a subject that is likely or suspected of having ALL, and the gene product is a polynucleotide, such as RNA, e.g. mRNA. In any of the provided embodiments, the sample is a bone marrow aspirate from a subject with ALL, or that is likely or suspected of having ALL, and the gene product is a protein.

[0138] In any of the provided embodiments, the sample is a body fluid sample from a subject with ALL, or a subject that is likely or suspected of having ALL, and the gene product is a protein. In a preferred embodiment, the body fluid sample is a plasma sample.

[0139] B. Gene Products

[0140] In some embodiments, the methods provided herein include one or more steps to measure, assess, determine, and/or quantify the expression of one or a more genes (interchangeably referred to herein as one or more “gene products”), e.g., to determine a gene expression profile, of a sample to assess, predict, infer, and/or estimate a risk, likelihood, and/or probability of toxicity. In some embodiments, the sample is taken, collected, and/or obtained from subject that is administered, will be administered, or is a candidate to be administered a therapy, e.g., an immunotherapy or a T cell therapy. In particular embodiments, the sample is from a subject prior to receiving the immunotherapy, such as within 0 to 7 days prior to receiving the immunotherapy, such as cell therapy (e.g. CAR-T cells), e.g. within 1 day, 2 days, 3 days, 4 days, 5 days, 6 days or 7 days prior to receiving the immunotherapy. In certain embodiments, the expression of the one or more genes is predictive of, correlated with, and/or associated with a risk, likelihood, and/or probability of the subject developing a toxicity following administration of a therapeutic treatment.

[0141] Particular embodiments contemplate that the expression of one or more genes in a sample, e.g. from a subject prior to receiving an immunotherapy, e.g. cell therapy, is predictive of, correlated with, and/or associated with a risk, e.g., a high risk or a low risk, of toxicity, e.g., toxicity following administration of a therapeutic treatment. In certain embodiments, the expression of the one or more genes in the sample e.g. from a subject prior to receiving an immunotherapy, e.g. cell therapy, includes one or more genes that are negatively correlated with and/or negatively associated with a risk and/or an incidence of a toxicity. In particular embodiments, the expression of the one or more genes in the sample, e.g. from a subject prior to receiving an immunotherapy, e.g. cell therapy, includes one or more genes that are positively correlated with and/or positively associated with a risk and/or an incidence of a toxicity.

[0142] In certain embodiments, elevated, increased, or high amounts or levels of expression of one or more genes that are negatively correlated to and/or negatively associated with a risk and/or an incidence of toxicity in a sample, e.g. from a subject prior to receiving an immunotherapy, e.g. cell therapy, are predictive of and/or associated with a low, reduced, or decreased risk, likelihood, and/or probability of toxicity, e.g., neurotoxicity or severe neurotoxicity. In particular embodiments, reduced, decreased, or low amounts or levels of expression of one or more genes that are negatively correlated to a risk of toxicity in a sample, e.g. from a subject prior to receiving an immunotherapy, e.g. cell therapy, are predictive of and/or associated with a high, increased, or elevated risk of neurotoxicity.

[0143] In certain embodiments, elevated, increased, or high amounts or levels of expression of one or more genes that are positively correlated to and/or positively associated with a risk and/or an incidence of toxicity in a sample obtained from a subject are predictive of and/or associated with a high, increased, or elevated risk of neurotoxicity. In particular embodiments, reduced, decreased, or low amounts or levels of expression of one or more genes that are positively correlated to a risk of toxicity in a sample obtained from a subject are predictive of and/or associated with a low or reduced risk of toxicity, e.g., neurotoxicity or severe neurotoxicity.

[0144] In certain embodiments, the expression of at least one, at least two, at least three, at least four, at least five, at least six, at least seven, at least eight, at least nine, at least ten, at least eleven, at least twelve, at least thirteen, at least fourteen, at least fifteen, at least sixteen, at least seventeen, at least eighteen, at least nineteen, at least twenty, at least twenty-five, at least thirty, at least forty, at least fifty, at least sixty, at leave seventy, at least eighty, at least ninety or at least one hundred genes that are that are negatively correlated to and/or negatively associated with a risk and/or an incidence of a toxicity are assessed, measured, detected, and/or quantified. In some embodiments, 1, 2, 3, 4, 5, 6, 7, 8, 9, 10, 11, 12, 13, 14, 15, 16, 17, 18, 19, 20, 21, 22, 23, 34, 25 or more genes that are negatively correlated to and/or negatively associated with a risk and/or and an incidence of a toxicity are assessed, measured, detected, and/or quantified. In particular embodiments, at least one, at least two, at least three, at least four, at least five, at least six, at least seven, at least eight, at least nine, at least ten, at least eleven, at least twelve, at least thirteen, at least fourteen, at least fifteen, at least sixteen, at least seventeen, at least eighteen, at least nineteen, at least twenty, at least twenty-five, at least thirty, at least forty, at least fifty, at least sixty, at least seventy, at least eighty, at least ninety, or at least one hundred genes that are that are positively correlated to and/or positively associated with a risk and/or an incidence of a toxicity are assessed, measured, detected, and/or quantified. In some embodiments, 1, 2, 3, 4, 5, 6, 7, 8, 9, 10, 11, 12, 13, 14, 15, 16, 17, 18, 19, 20, 21, 22, 23, 34, 25 or more genes that are positively correlated to and/or negatively associated with a risk and/or and an incidence of a toxicity are assessed, measured, detected, and/or quantified. In some embodiments, one or more genes as described that is positively correlated with a risk and/or an incidence of a toxicity are assessed, measured, detected, and/or quantified and one or more genes as described that are negatively correlated with a risk and/or an incidence of a toxicity are assessed, measured, detected, and/or quantified.

[0145] In some embodiments, an expression of a gene that is negatively correlated to or negatively associated with a risk, likelihood, and/or probability of toxicity has, is likely to have, or has been determined to negatively correlative to the risk, likelihood, and/or probability of a toxicity that is CRS or neurotoxicity. In particular embodiments, the toxicity is severe neurotoxicity, e.g., a neurotoxicity of a grade 4 or 5 or of a prolonged grade 3 or greater. In some embodiments, the negative correlation between the expression of the gene and the risk of toxicity has, is likely to have, or has been determined to have a correlation coefficient (R) value of at or below −0.25, at or below −0.3, at or below −0.4, at or below −0.5, at or below −0.55, at or below −0.6, at or below −0.65, at or below −0.7, at or below −0.75, at or below −0.8, at or below −0.85, at or below −0.90, at or below −0.95, at or below −0.97, at or below −0.98, at or below −0.99, or about −1.0.

[0146] In some embodiments, an expression of a gene that is identified as negatively correlated to or negatively associated with a risk of toxicity has been identified based on data from a study, e.g., a clinical study. In some embodiments, the expression of the gene has been negatively correlated with an incidence of the toxicity. In certain embodiments, the toxicity is neurotoxicity. In some embodiments, the toxicity is severe neurotoxicity, e.g., a neurotoxicity of a grade 4 or 5 or of a prolonged grade 3 or greater. In some embodiments, the toxicity is CRS. In particular embodiments, the negative correlation between the expression of the gene and the incidence of toxicity has, is likely to have, or has been determined to have a correlation coefficient (R) of at or below −0.25, at or below −0.3, at or below −0.4, at or below −0.5, at or below −0.55, at or below −0.6, at or below −0.65, at or below −0.7, at or below −0.75, at or below −0.8, at or below −0.85, at or below −0.90, at or below −0.95, at or below −0.97, at or below −0.98, at or below −0.99, or about −1.0.

[0147] In some embodiments, an expression of a gene that is negatively correlated to or negatively associated with a risk or toxicity includes the expression of one or more of ABCA9, ADAMTSL4, ADGRA2, ADGRF1, AKS, APOL1, ARHGAP27, ARID3B, CA6, CABP7, CCDC152, CCL17, CCR1, CCR6, CEP85L, CISH, CR2, ENAM, ENPP2, EPHA4, FTH1P11, FTH1P2, FTH1P8, GADD45A, GAS6, GBP3, GBP5, GBP6, GIMAP1-GIMAPS, GLI2, GPA33, GPRIN3, HSPA1A, IFITM1, IFITM3, IL15, IL2RA, JCHAIN, KIAA1257, LA16c-390H2.4, LAMB1, LDB3, LINC00623, LST1, LTB, LY6E, MAS1, MUC4, NLRC3, PLXNA4, PON2, PTGES3P1, PTP4A3, RNU1-1, RP11-345J4.6, RP11-421N8.1, RP11-51J9.5, RP11-51O6.1, RP11-552F3.9, RP11-686D22.9, RP11-723D22.3, RP11-723O4.6, RP13-512J5.1, RP4-620F22.2, RP5-940J5.9, RP6-109B7.5, RPL21P75, RYR2, SAMD9L, SEMA6A, SLC37A3, SNRPEP4, SOCS1, SPATS2L, SPON1, SV2C, TMEM154, TP53INP1, TNF, TRIM47, UST, WNT9A, ENG, SELE, ICAM3, or IL6R. In certain embodiments, an expression of a gene that is negatively correlated to or negatively associated with a risk of toxicity includes the expression of one or more of ADGRF1, CA6, CCL17, CCR6, ENAM, GAS6, GBP5, GLI2, IFITM1, IGJ (JCHAIN), MUC4, PON2, PTP4A3, SEMA6A, SLC37A3, SPATS2L, TMEM154, TP53INP1, IL2RA, and WNT9A. In particular embodiments, an expression of a gene that is negatively correlated to or negatively associated with a risk of toxicity includes the expression of one or more of CCL17, CA6, JCHAIN, PTP4A3, IFITM1, CRLF2, ENAM, GBP5, ABCA9, SV2C, SLC37A3, IL15, IL2RA, and SEMA6A. In some embodiments, an expression of a gene that is negatively correlated to or negatively associated with a risk of toxicity includes the expression of one or more of CCL17, CCR6, GAS6, GL12, PTP4A3, or IL2RA. The full name, alternative symbols, and polynucleotide and polypeptide sequences of the gene products of genes with expression negatively correlated to toxicity, e.g., neurotoxicity or severe neurotoxicity, are shown in Table 1.

TABLE 1
Genes with expression negatively correlated to toxicity

| | | Alternative Names | | | |
|---|---|---|---|---|---|
| Gene Symbol | Full Name | and Symbols | Uniprot ID | mRNA | Protein |
| CA6 | carbonic anhydrase 6 | CA-VI; GUSTIN | P23280 | SEQ ID | SEQ ID |
| | | | | NOS: | NOS: |
| | | | | 1-4 | 49-52 |
| CCL17 | C-C motif chemokine ligand | TARC; ABCD-2; | Q92583 | SEQ ID | SEQ ID |
| | 17 | SCYA17; A-152E5.3 | | NO: 5 | NO: 53 |
| CCR6 | C-C motif chemokine | BN-1; DCR2; DRY6; | P51684 | SEQ ID | SEQ ID |
| | receptor 6 | CCR-6; CD196; | | NO: 6 | NO: 54 |
| | | CKRL3; GPR29; | | | |
| | | CKR-L3; CMKBR6; | | | |
| | | GPRCY4; STRL22; | | | |
| | | CC-CKR-6; C-C | | | |
| | | CKR-6 | | | |
| ENAM | enamelin | ADAI; AI1C; AIH2 | Q9NRM1 | SEQ ID | SEQ ID |
| | | | | NO: 7 | NO: 55 |
| GAS6 | growth arrest specific 6 | AXSF; AXLLG | Q14393 | SEQ ID | SEQ ID |
| | | | | NO: 8 | NO: 56 |
| GBP5 | guanylate binding protein 5 | GBP-5 | Q96PP8 | SEQ ID | SEQ ID |
| | | | | NO: 9 | NO: 57 |
| GLI2 | GEI family zinc finger 2 | CJS; HPE9; PHS2; | P10070 | SEQ ID | SEQ ID |
| | | THP1; THP2 | | NO: 10 | NO: 58 |
| ADGRF1 | adhesion G protein-coupled | PGR19; GPR110; | Q5T601 | SEQ ID | SEQ ID |
| | receptor F1 | KPG_012; hGPCR36 | | NOS: | NOS: |
| | | | | 11-12 | 59-60 |
| IFITM1 | interferon induced | 9-27; CD225; IFI17; | P13164 | SEQ ID | SEQ ID |
| | transmembrane protein 1 | LEU13; DSPA2a | | NO: 13 | NO: 61 |
| JCHAIN | joining chain of multimeric | IGJ; JCH; IGCJ | P01591 | SEQ ID | SEQ ID |
| | IgA and IgM | | | NO: 14 | NO: 62 |
| MUC4 | Mucin 4 | ASGP; MUC-4; | Q99102 | SEQ ID | SEQ ID |
| | | HSA276359 | | NOS: | NOS: |
| | | | | 15-18 | 63-66 |
| PON2 | paraoxonase 2 | A-esterase 2; aromatic | Q15165 | SEQ ID | SEQ ID |
| | | esterase 2; arylesterase | | NOS: | NOS: |
| | | 2; paraoxonase nirs; | | 19 and | 67-68 |
| | | serum aryldialkyl- | | 20 | |
| | | phosphatase 2 | | | |
| PTP4A3 | protein tyrosine phosphatase | PRL3; PRL-3; PRL-R | O75365 | SEQ ID | SEQ ID |
| | type IVA, member 3 | | | NOS: | NOS: |
| | | | | 21-22 | 69-70 |
| SEMA6A | semaphorin 6A | VIA; SEMA; HT018; | Q9H2E6 | SEQ ID | SEQ ID |
| | | SEMAQ; SEMA6A1 | | NO: 23 | NO: 71 |
| SLC37A3 | solute carrier family 37 | Sugar phosphate | Q8NCC5 | SEQ ID | SEQ ID |
| | member 3 | exchanger 3 | | NO: 24 | NO: 72 |
| SPATS2L | spermatogenesis associated | SPATS2-like protein; | Q9NUQ6 | SEQ ID | SEQ ID |
| | serine rich 2 like | SGNP; DNAPTP6 | | NO: 25 | NO: 73 |
| TMEM154 | transmembrane protein 154 | | Q6P9G4 | SEQ ID | SEQ ID |
| | | | | NO: 26 | NO: 74 |
| TP53INP1 | tumor protein p53 inducible | SIP; Teap; p53DINP1; | Q96A56 | SEQ ID | SEQ ID |
| | nuclear protein 1 | TP53DINP1; | | NOS: | NOS: |
| | | TP53INP1A; | | 27-28 | 75-76 |
| | | TP53INP1B | | | |
| WNT9A | Wnt family member 9A | | O14904 | SEQ ID | SEQ ID |
| | | | | NO: 29 | NO: 77 |
| IL2RA | Interleukin-2 receptor subunit | TAC antigen; p55; | P01589 | SEQ ID | SEQ ID |
| | alpha | CD25 | | NOS: | NOS: |
| | | | | 97-99 | 120-122 |
| ABCA9 | ATP-binding cassette sub- | | Q8IUA7 | | |
| | family A member 9 | | | | |
| ADAMTSL4 | ADAMTS-like protein 4 | | Q6UY14 | | |
| ADGRA2 | Adhesion G protein-coupled | | Q96PE1 | | |
| | receptor A2 | | | | |
| AK5 | Adenylate kinase isoenzyme | | Q9Y6K8 | | |
| | 5 | | | | |
| APOL1 | Apolipoprotein L1 | | O14791 | | |
| ARHGAP27 | Rho GTPase-activating | | Q6ZUM4 | | |
| | protein 27 | | | | |
| ARID3B | AT-rich interactive domain- | | Q8IVW6 | | |
| | containing protein 3B | | | | |
| CABP7 | Calcium-binding protein 7 | | Q86V35 | | |
| CCDC152 | Coiled-coil domain- | | Q4G0S7 | | |
| | containing protein 152 | | | | |
| CCR1 | C-C chemokine receptor type | | P32246 | | |
| | 1 | | | | |
| CEP85L | Centrosomal protein of 85 | | Q5SZL2 | | |
| | kDa-like | | | | |
| CISH | Cytokine-inducible SH2- | | Q9NSE2 | | |
| | containing protein | | | | |
| CR2 | Complement receptor type 2 | | P20023 | | |
| EPHA4 | Ephrin type-A receptor 4 | | P54764 | | |
| ENPP2 | Ectonucleotide | | Q13822 | | |
| | pyrophosphatase/phospho- | | | | |
| | diesterase family member 2 | | | | |
| FTH1P11 | ferritin heavy chain 1 | | | | |
| | pseudogene 11 | | | | |
| FTH1P2 | ferritin heavy chain 1 | | | | |
| | pseudogene 2 | | | | |
| FTH1P8 | ferritin heavy chain 1 | | | | |
| | pseudogene 8 | | | | |
| GADD45A | Growth arrest and DNA | | P24522 | | |
| | damage-inducible protein | | | | |
| | GADD45 alpha | | | | |
| GBP3 | Guanylate-binding protein 3 | | Q9H0R5 | | |
| GBP6 | Guanylate-binding protein 6 | | Q6ZN66 | | |
| GIMAP1- | GIMAP1-GIMAP5 | | A0A087 | | |
| GIMAP5 | readthrough | | WTJ2 | | |
| GPA33 | Cell surface A33 antigen | | Q99795 | | |
| GPRIN3 | G protein-regulated inducer | | Q6ZVF9 | | |
| | of neurite outgrowth 3 | | | | |
| HSPA1A | Heat shock 70 kDa protein | | P0DMV8 | | |
| | 1A | | | | |
| IFITM3 | Interferon-induced | | Q01628 | | |
| | transmembrane protein 3 | | | | |
| IL15 | Interleukin-15 | | P40933 | | |
| KIAA1257 | Uncharacterized protein | | Q9ULG3 | | |
| | KIAA1257 | | | | |
| LA16c-390H2.4 | LOC101929732 | | | | |
| LAMB1 | Laminin subunit beta-1 | | P07942 | | |
| LDB3 | LIM domain-binding protein | | O75112 | | |
| | 3 | | | | |
| LINC00623 | long intergenic non-protein | | | | |
| | coding RNA 623 | | | | |
| LST1 | Leukocyte-specific transcript | | O00453 | | |
| | 1 protein | | | | |
| LTB | Lymphotoxin-beta | | Q06643 | | |
| LY6E | Lymphocyte antigen 6E | | Q16553 | | |
| MAS1 | Proto-oncogene Mas | | P04201 | | |
| NLRC3 | NLR family CARD domain- | | Q7RTR2 | | |
| | containing protein 3 | | | | |
| PLXNA4 | Plexin-A4 | | Q9HCM2 | | |
| PTGES3P1 | prostaglandin E synthase 3 | | — | | |
| | pseudogene 1 | | | | |
| RNU1-1 | RNA, U1 small nuclear 1 | | — | | |
| RP11-345J4.6 | — | | — | | |
| RP11-421N8.1 | — | | — | | |
| RP11-51J9.5 | — | | — | | |
| RP11-51O6.1 | — | | — | | |
| RP11-552F3.9 | — | | — | | |
| RP11-686D22.9 | — | | — | | |
| RP11-723D22.3 | — | | — | | |
| RP11-723O4.6 | — | | — | | |
| RP13-512J5.1 | — | | — | | |
| RP4-620F22.2 | — | | — | | |
| RP5-940J5.9 | — | | — | | |
| RP6-109B7.5 | — | | — | | |
| RPL21P75 | — | | — | | |
| RYR2 | Ryanodine receptor 2 | | Q92736 | | |
| SAMD9L | Sterile alpha motif domain- | | Q8IVG5 | | |
| | containing protein 9-like | | | | |
| SNRPEP4 | small nuclear | | — | | |
| | ribonucleoprotein polypeptide | | | | |
| | E pseudogene 4 | | | | |
| SOCS1 | Suppressor of cytokine | | O15524 | | |
| | signaling 1 | | | | |
| SPON1 | Spondin-1 | | Q9HCB6 | | |
| SV2C | Synaptic vesicle glycoprotein | | Q496J9 | | |
| | 2C | | | | |
| TNF | Tumor necrosis factor | | P01375 | | |
| TRIM47 | Tripartite motif-containing | | Q96LD4 | | |
| | protein 47 | | | | |
| UST | Uronyl 2-sulfotransferase | | Q9Y2C2 | | |
| ENG | Endoglin | | P17813 | | |
| SELE | E-Selectin | | P16581 | | |
| ICAM3 | Intercellular adhesion | | P32942 | | |
| | molecule 3 | | | | |
| IL6R | Interleukin-6 receptor subunit | | P08887 | | |
| | alpha | | | | |
| CRLF2 | Cytokine receptor-like factor | | Q9HC73 | | |
| | 2 | | | | |

[0148] In certain embodiments, the expression of the one or more genes is positively correlated to a risk of toxicity following administration of a therapeutic treatment. In some embodiments, reduced, decreased, or low amounts or levels of expression of one or more genes that are positively correlated to a risk of toxicity in a sample obtained from a subject are predictive of and/or associated with a low or reduced risk of toxicity, e.g., neurotoxicity or severe neurotoxicity. In some embodiments, elevated, increased, or high amounts or levels of expression of one or more genes that are positively correlated to a risk of toxicity in a sample obtained from a subject are predictive of and/or associated with a high, increased, or elevated risk of neurotoxicity.

[0149] In certain embodiments, an expression of a gene that is identified as positively correlated to or positively associated with a risk of toxicity has, is likely to have, or has been determined to have a gene expression with a positive correlation to the risk of the toxicity. In certain embodiments, the toxicity is neurotoxicity. In particular embodiments, the toxicity is severe neurotoxicity, e.g., a neurotoxicity of a grade 4 or 5 or of a prolonged grade 3. In particular embodiments, the positive correlation has, is likely to have, or has been determined to have a positive correlation to the risk of the toxicity with a correlation coefficient (R) of at least 0.25, at least 0.3, at least 0.4, at least 0.5, at least 0.55, at least 0.6, at least 0.65, at least 0.7, at least 0.75, at least 0.8, at least 0.85, at least 0.90, at least 0.95, at least 0.97, at least 0.98, at least 0.99, or about 1.0.

[0150] In some embodiments, an expression of a gene that is identified as positively correlated to or positively associated with a risk of toxicity has been identified based on data from a study, e.g., a clinical study. In some embodiments, the expression of the gene has been positively correlated with an incidence of the toxicity, such as CRS or neurotoxicity. In certain embodiments, the toxicity is neurotoxicity. In some embodiments, the toxicity is severe neurotoxicity, e.g., a neurotoxicity of a grade 4 or 5 or of a prolonged grade 3 or greater. In some embodiments, the positive correlation has, is likely to have, or has been determined to have a positive correlation to the incidence of the toxicity with a correlation coefficient (R) of at least 0.25, at least 0.3, at least 0.4, at least 0.5, at least 0.55, at least 0.6, at least 0.65, at least 0.7, at least 0.75, at least 0.8, at least 0.85, at least 0.90, at least 0.95, at least 0.97, at least 0.98, at least 0.99, or about 1.0.

[0151] In some embodiments, an expression of a gene that is identified as positively correlated to or positively associated with a risk of toxicity includes the expression of one or more of ASAP2, ATP8B1, ATP9A, CCNA1, CDHR3, CECR2, CELF4, DLX1, DPYSL3, EHD4, FMNL2, GGA2, GPR176, HHIPL1, HOXA7, HMX3, IGF2BP1, IL3RA, IRX3, IRX5, KCN1P1, KIAA1644, LINC00092, LINC01483, MDFI, MIB1, MMP14, NOM1, OTOA, PCDHGA12, PCDHGA4, PCDHGA6, PCDHGB1, PCDHGBS, PCDHGB6, PINLYP, PPM1E, PRKD1, PROKR2, PRSS12, PRTG, PTCH1, RFX8, RP11-146B14.1, RP11-3P17.5, RP11-41O4.1, RP11-713N11.4, RP4-568B10.1, SERF1A, SEZ6L, SMURF1, TBC1D30, TCF12, TCP11, TM9SF3, TMPRSS15, TMSB15A, TNKS1BP1, TREM2, TTC28, PCDHGA9, FMNL1, or ZNF415. In certain embodiments, an expression of a gene that is identified as positively correlated to or positively associated with a risk of toxicity includes the expression of one or more of ASAP2, FMNL2, GPR176, MDFI, PCDHGA12, PCDHGA6, PCDHGB5, PCDHGB6, PINLYP, PTCH1, ATP9A, HMX3, DPYSL3, ZNF415, IRX5, TMPRSS15, IL3RA, IGF2BP1, or TTC28. In certain embodiments, an expression of a gene that is identified as positively correlated to or positively associated with a risk of toxicity includes the expression of one or more of PCDHGA12, PCDHGB6, PCDHGB5, PCDHGA9, PINLYP, ASAP2, TTC28, PTCH1, and FMNL1. The full name, alternative symbols, and polynucleotide and polypeptide sequences of the gene products of genes with expression negatively correlated to toxicity, e.g., neurotoxicity or severe neurotoxicity, are shown in Table 2.

TABLE 2
Genes with expression positive correlated to toxicity

| | | Alternative Names | | | |
|---|---|---|---|---|---|
| Gene Symbol | Full Name | and Symbols | Uniprot ID | mRNA | Protein |
| ASAP2 | ArfGAP with SH3 | Development and | O43150 | SEQ ID | SEQ ID |
| | domain, ankyrin | differentiation- | | NO: 30 | NO: 78 |
| | repeat and PH | enhancing factor 2; | | | |
| | domain 2 | Paxillin-associated | | | |
| | | protein with ARF | | | |
| | | GAP activity 3; | | | |
| | | PAP; PAG3; | | | |
| | | AMAP2; DDEF2; | | | |
| | | SHAG1; CENTB3; | | | |
| | | Pap-alpha | | | |
| FMNL2 | formin like 2 | FHOD2 | Q96PY5 | SEQ ID | SEQ ID |
| | | | | NO: 31 | NO: 79 |
| GPR176 | G protein-coupled | HB-954 | Q14439 | SEQ ID | SEQ ID |
| | receptor 176 | | | NOS: 32-34 | NOS: 80-82 |
| MDFI | MyoD family | I-MF; I-mfa | Q99750 | SEQ ID | SEQ ID |
| | inhibitor | | | NOS: 35-36 | NOS: 83-84 |
| PCDHGA12 | protocadherin | FIB3; CDH21; | O60330 | SEQ ID | SEQ ID |
| | gamma subfamily | PCDH-GAMMA- | | NOS: 37-38 | NOS: 85-86 |
| | A, 12 | A12 | | | |
| PCDHGA6 | protocadherin | PCDH-GAMMA-A6 | Q9Y5G7 | SEQ ID | SEQ ID |
| | gamma subfamily | | | NOS: 39-40 | NOS: 87-88 |
| | A, 6 | | | | |
| PCDHGB6 | protocadherin | PCDH-GAMMA-B6 | Q9Y5G7 | SEQ ID | SEQ ID |
| | gamma subfamily | | | NOS: 41-42 | NOS: 89-90 |
| | B, 6 | | | | |
| PINLYP | phospholipase A2 | 2310033E01Rik | A6NC86 | SEQ ID | SEQ ID |
| | inhibitor and | | | NOS: 43-44 | NOS: 91-92 |
| | LY6/PLAUR | | | | |
| | domain containing | | | | |
| PTCH1 | Protein patched | PTC; BCNS; HPE7; | Q13635 | SEQ ID | SEQ ID |
| | homolog 1 | PTC1; PTCH; | | NOS: 45-47 | NOS: 93-95 |
| | | NBCCS; PTCH11 | | | |
| TTC28 | tetratricopeptide | TPR repeat- | Q96AY4 | SEQ ID | SEQ ID |
| | repeat domain 28 | containing big gene | | NO: 48 | NO: 96 |
| | | cloned at Keio; | | | |
| | | TPRBK; | | | |
| | | KIAA1043; | | | |
| ATP9A | ATPase | ATPIIA | Q2NLD0 | SEQ ID | SEQ ID |
| | phospholipid | | | NO: 100 | NO: 123 |
| | transporting 9A | | | | |
| HMX3 | H6 family | Homeobox protein | A6NHT5 | SEQ ID | SEQ ID |
| | homeobox 3 | H6 family member | | NO: 101 | NO: 124 |
| | | 3; NKX5.1; Nkx5-1; | | | |
| | | NKX-5.1 | | | |
| DPYSL3 | dihydropyrimidinase | DRP3; ULIP; | Q14195 | SEQ ID | SEQ ID |
| | like 3 | CRMP4; DRP-3; | | NOS: 102- | NOS: 125- |
| | | LCRMP; CRMP-4; | | 103 | 126 |
| | | ULIP-1 | | | |
| ZNF415 | zinc finger protein | ZfLp | Q09FC8 | SEQ ID | SEQ ID |
| | 415 | | | NOS: 104- | NOS: 127- |
| | | | | 112 | 135 |
| IRX5 | iroquois homeobox | Iroquois-class | P78411 | SEQ ID | SEQ ID |
| | 5 | homeodomain | | NOS: 113- | NOS: 136- |
| | | protein IRX-5; | | 114 | 137 |
| | | HMMS; IRXB2; | | | |
| | | IRX-2a | | | |
| TMPRSS15 | transmembrane | Enteropeptidase; | P98073 | SEQ ID | SEQ ID |
| | protease, serine 15 | Enterokinase; Serine | | NO: 115 | NO: 138 |
| | | protease 7 | | | |
| | | ENTK; PRSS7 | | | |
| IL3RA | interleukin 3 | IL3R; CD123; | P26951 | SEQ ID | SEQ ID |
| | receptor subunit | IL3RX; IL3RY; | | NOS: 116- | NOS: 139- |
| | alpha | IL3RAY; hIL-3Ra | | 117 | 140 |
| IGF2BP1 | insulin like growth | CRD-BP; CRDBP; | Q9NZI8 | SEQ ID | SEQ ID |
| | factor 2 mRNA | IMP-1; IMP1; | | NOS: 118- | NOS: 141- |
| | binding protein 1 | VICKZ1; ZBP1 | | 119 | 142 |
| PCDHGB5 | protocadherin | PCDH-GAMMA-B5 | Q9NZI8 | SEQ ID | SEQ ID |
| | gamma subfamily B, | | | NOS: 143- | NOS: 145- |
| | 5 | | | 144 | 146 |
| ATP8B1 | Phospholipid- | | O43520 | | |
| | transporting ATPase | | | | |
| | IC | | | | |
| CCNA1 | Cyclin-A1 | | P78396 | | |
| CDHR3 | Cadherin-related | | Q6ZTQ4 | | |
| | family member 3 | | | | |
| CECR2 | Cat eye syndrome | | Q9BXF3 | | |
| | critical region | | | | |
| | protein 2 | | | | |
| CELF4 | CUGBP Elav-like | | Q9BZC1 | | |
| | family member 4 | | | | |
| DLX1 | Homeobox protein | | P56177 | | |
| | DLX-1 | | | | |
| EHD4 | EH domain- | | Q9H223 | | |
| | containing protein 4 | | | | |
| GGA2 | ADP-ribosylation | | Q9UJY4 | | |
| | factor-binding | | | | |
| | protein GGA2 | | | | |
| HHIPL1 | HHIP-like protein 1 | | Q96JK4 | | |
| HOXA7 | Homeobox protein | | P31268 | | |
| | Hox-A7 | | | | |
| IRX3 | Iroquois-class | | P78415 | | |
| | homeodomain | | | | |
| | protein IRX-3 | | | | |
| KCNIP1 | Kv channel- | | Q9NZI2 | | |
| | interacting protein 1 | | | | |
| KIAA1644 | Uncharacterized | | Q3SXP7 | | |
| | protein KIAA1644 | | | | |
| LINC00092 | long intergenic non- | | — | | |
| | protein coding RNA | | | | |
| | 92 | | | | |
| LINC01483 | long intergenic non- | | — | | |
| | protein coding RNA | | | | |
| | 1483 | | | | |
| MIB1 | E3 ubiquitin-protein | | Q86YT6 | | |
| | ligase MIB1 | | | | |
| MMP14 | Matrix | | P50281 | | |
| | metalloproteinase- | | | | |
| | 14 | | | | |
| NOM1 | Nucleolar MIF4G | | Q5C9Z4 | | |
| | domain-containing | | | | |
| | protein 1 | | | | |
| OTOA | Otoancorin | | Q7RTW8 | | |
| PCDHGA4 | Protocadherin | | Q9Y5G9 | | |
| | gamma-A4 | | | | |
| PCDHGB1 | Protocadherin | | Q9Y5G3 | | |
| | gamma-B1 | | | | |
| PPM1E | Protein phosphatase | | Q8WY54 | | |
| | 1E | | | | |
| PRKD1 | Serine/threonine- | | Q15139 | | |
| | protein kinase D1 | | | | |
| PROKR2 | Prokineticin | | Q8NFJ6 | | |
| | receptor 2 | | | | |
| PRSS12 | Neurotrypsin | | P56730 | | |
| PRTG | Protogenin | | Q2VWP7 | | |
| RFX8 | DNA-binding | | Q6ZV50 | | |
| | protein RFX8 | | | | |
| RP11-146B14.1 | | | | | |
| RP11-3P17.5 | | | | | |
| RP11-41O4.1 | | | | | |
| RP11-713N11.4 | | | | | |
| RP4-568B10.1 | | | | | |
| SERF1A | Small EDRK-rich | | O75920 | | |
| | factor 1 | | | | |
| SEZ6L | Seizure 6-like | | Q9BYH1 | | |
| | protein | | | | |
| SMURF1 | E3 ubiquitin-protein | | Q9HCE7 | | |
| | ligase SMURF1 | | | | |
| TBC1D30 | TBC1 domain | | Q9Y2I9 | | |
| | family member 30 | | | | |
| TCF12 | Transcription factor | | Q99081 | | |
| | 12 | | | | |
| TCP11 | T-complex protein | | Q8WWU5 | | |
| | 11 homolog | | | | |
| TM9SF3 | Transmembrane 9 | | Q9HD45 | | |
| | superfamily member | | | | |
| | 3 | | | | |
| TMSB15A | Thymosin beta-15A | | P0CG34 | | |
| TNKS1BP1 | 182 kDa tankyrase- | | Q9C0C2 | | |
| | 1-binding protein | | | | |
| TREM2 | Triggering receptor | | Q9NZC2 | | |
| | expressed on | | | | |
| | myeloid cells 2 | | | | |
| PCDHGA9 | Protocadherin | PCDH-gamma-A9 | Q9Y5G4 | | |
| | gamma-A9; | | | | |
| FMNL1 | Formin-like protein | CLL-associated | O95466 | | |
| | 1 | antigen KW-13; | | | |
| | | Leukocyte formin; | | | |
| | | C17orf1, C17orf1B, | | | |
| | | FMNL, FRL1 | | | |

[0152] In some embodiments, provided herein are panels, profiles, and/or arrays for use in the measurement, assessment, and/or determination of one or more gene products in a sample e.g. from a subject prior to receiving an immunotherapy, e.g. cell therapy, to assess risk, probability, and/or likelihood of toxicity following administration of and/or associated with a therapy. In certain embodiments, the panels, profiles, and/or arrays are suitable for use to measure, assess, detect, and/or quantify the level and/or amount of one or more gene products in a sample, e.g., a BMA sample or a serum sample, such as from a subject prior to receiving an immunotherapy, e.g. cell therapy. In certain embodiments, the gene products are proteins and/or polypeptides. In some embodiments, the gene products are polynucleotides, e.g., mRNA or cDNA derived from mRNA. In particular embodiments, the panels, profiles, and/or arrays include the measurements, assessments, and/or quantifications of at least one, two, three, four, five, six, seven, eight, nine, ten, more than ten, or more than twenty gene products. In some embodiments, the gene products include one or more of the genes listed in Table 1, Table 2, Table 3, Table E2A and/or Table E2B.

[0153] In particular embodiments, the panels, profiles, and/or arrays include the measurements, assessments and/or quantifications of gene products from one or more genes listed in Table 1 and/or Table E2A and/or one or more genes listed in Table 2 and/or Table E2B. In some embodiments, the panels, profiles, and/or arrays include the measurements, assessments and/or quantifications of gene products from one or more of ABCA9, ADAMTSL4, ADGRA2, ADGRF1, AK5, APOL1, ARHGAP27, ARID3B, CA6, CABP7, CCDC152, CCL17, CCR1, CCR6, CEP85L, CISH, CR2, ENAM, ENPP2, EPHA4, FTH1P11, FTH1P2, FTH1P8, GADD45A, GAS6, GBP3, GBP5, GBP6, GIMAP1-GIMAP5, GLI2, GPA33, GPRIN3, HSPA1A, IFITM1, IFITM3, IL15, IL2RA, JCHAIN, KIAA1257, LA16c-390H2.4, LAMB1, LDB3, LINC00623, LST1, LTB, LY6E, MAS1, MUC4, NLRC3, PLXNA4, PON2, PTGES3P1, PTP4A3, RNU1-1, RP11-345J4.6, RP11-421N8.1, RP11-51J9.5, RP11-51O6.1, RP11-552F3.9, RP11-686D22.9, RP11-723D22.3, RP11-723O4.6, RP13-512J5.1, RP4-620F22.2, RP5-940J5.9, RP6-109B7.5, RPL21P75, RYR2, SAMD9L, SEMA6A, SLC37A3, SNRPEP4, SOCS1, SPATS2L, SPON1, SV2C, TMEM154, TP53INP1, TNF, TRIM47, UST, WNT9A, ENG, SELE, ICAM3, or IL6R, and/or one or more of ASAP2, ATP8B1, ATP9A, CCNA1, CDHR3, CECR2, CELF4, DLX1, DPYSL3, EHD4, FMNL2, GGA2, GPR176, HHIPL1, HOXA7, HMX3, IGF2BP1, IL3RA, IRX3, IRX5, KCNIP1, KIAA1644, LINC00092, LINC01483, MDFI, MIB1, MMP14, NOM1, OTOA, PCDHGA12, PCDHGA4, PCDHGA6, PCDHGB1, PCDHGBS, PCDHGB6, PINLYP, PPM1E, PRKD1, PROKR2, PRSS12, PRTG, PTCH1, RFX8, RP11-146B14.1, RP11-3P17.5, RP11-41O4.1, RP11-713N11.4, RP4-568B10.1, SERF1A, SEZ6L, SMURF1, TBC1D30, TCF12, TCP11, TM9SF3, TMPRSS15, TMSB15A, TNKS1BP1, TREM2, TTC28, PCDHGA9, FMNL1, or ZNF415.

[0154] In certain embodiments, the panels, profiles, and/or arrays include the measurements, assessments and/or quantifications of gene products from one or more of ADGRF1, CA6, CCL17, CCR6, ENAM, GAS6, GBP5, GLI2, IFITM1, IGJ (JCHAIN), MUC4, PON2, PTP4A3, SEMA6A, SLC37A3, SPATS2L, TMEM154, TP53INP1, IL2RA, and WNT9A and/or one or more of ASAP2, FMNL2, GPR176, MDFI, PCDHGA12, PCDHGA6, PCDHGB5, PCDHGB6, PINLYP, PTCH1, ATP9A, HMX3, DPYSL3, ZNF415, IRX5, TMPRSS15, IL3RA, IGF2BP1, or TTC28.

[0155] In particular embodiments, the panels, profiles, and/or arrays include the measurements, assessments and/or quantifications of gene products from one or more of CCL17, CA6, JCHAIN, PTP4A3, IFITM1, CRLF2, ENAM, GBP5, ABCA9, SV2C, SLC37A3, IL15, IL2RA, and SEMA6A and/or one or more of PCDHGA12, PCDHGB6, PCDHGB5, PCDHGA9, PINLYP, ASAP2, TTC28, PTCH1, and FMNL1.

[0156] In certain embodiments, the panels, profiles, and/or arrays include the measurements, assessments and/or quantifications of gene products from one or more of IGJ (JCHAIN), MUC4, CA6, WNT9A, ADGRF1 and CCL17 and/or one or more of PINLYP, ASAP2, FMNL2, PTCH1, TTC28, PCDHGA6, PCDHGB6 and PCDHGA12. In particular embodiments, the panels, profiles, and/or arrays include the measurements, assessments and/or quantifications of gene products from one or more of IGJ (JCHAIN), MUC4, CA6, WNT9A, ADGRF1 and CCL17 and/or one or more of PINLYP and PCDHGA12.

[0157] In certain embodiments, the sample is obtained, collected, or taken from the subject prior to treatment with the therapy, e.g., an immunotherapy and/or a cell therapy. In particular embodiments, the sample is obtained, collected, and/or taken from the subject prior to a treatment with a cell therapy. In particular embodiments, the cell therapy is a T cell therapy. In certain embodiments, the T cell therapy contains one or more engineered cells. In particular embodiments, the therapeutic T cell therapy contains cells that express a recombinant receptor, e.g., a CAR. In some embodiments, the sample does not contain any engineered cells, cells expressing a recombinant receptor, or cells expressing a CAR.

[0158] In certain embodiments, one or more gene products are measured in a biological sample. In particular embodiments, the sample is or contains bone marrow. In some embodiments, the sample is or contains bone marrow aspirates. In some embodiments, the bone marrow sample contains, or is suspected of containing, at least one diseased cell or cancer cell. In particular embodiments, the diseased cell or cancer cell is a B cell. In particular embodiments, the bone marrow sample contains one or more gene products of one or more genes listed in Table 1, Table 2, Table E2A, Table E2B, or table E4. In certain embodiments, the gene product is a polynucleotide and/or polypeptide. In some embodiments, the gene product is mRNA.

[0159] In certain embodiments, the biological sample is or is derived or taken from bone marrow, e.g., bone marrow aspirate. In particular embodiments, the one or more gene products are mRNA or proteins selected from ABCA9, ADAMTSL4, ADGRA2, ADGRF1, AK5, APOL1, ARHGAP27, ARID3B, CA6, CABP7, CCDC152, CCL17, CCR1, CCR6, CEP85L, CISH, CR2, ENAM, ENPP2, EPHA4, FTH1P11, FTH1P2, FTH1P8, GADD45A, GAS6, GBP3, GBP5, GBP6, GIMAP1-GIMAP5, GLI2, GPA33, GPRIN3, HSPA1A, IFITM1, IFITM3, IL15, IL2RA, JCHAIN, KIAA1257, LA16c-390H2.4, LAMB1, LDB3, LINC00623, LST1, LTB, LY6E, MAS1, MUC4, NLRC3, PLXNA4, PON2, PTGES3P1, PTP4A3, RNU1-1, RP11-345J4.6, RP11-421N8.1, RP11-51J9.5, RP11-51O6.1, RP11-552F3.9, RP11-686D22.9, RP11-723D22.3, RP11-723O4.6, RP13-512J5.1, RP4-620F22.2, RP5-940J5.9, RP6-109B7.5, RPL21P75, RYR2, SAMD9L, SEMA6A, SLC37A3, SNRPEP4, SOCS1, SPATS2L, SPON1, SV2C, TMEM154, TP53INP1, TNF, TRIM47, UST, and WNT9A or a portion or fragment thereof and/or are selected from ASAP2, ATP8B1, ATP9A, CCNA1, CDHR3, CECR2, CELF4, DLX1, DPYSL3, EHD4, FMNL2, GGA2, GPR176, HHIPL1, HOXA7, HMX3, IGF2BP1, IL3RA, IRX3, IRX5, KCNIP1, KIAA1644, LINC00092, LINC01483, MDFI, MIB1, MMP14, NOM1, OTOA, PCDHGA12, PCDHGA4, PCDHGA6, PCDHGB1, PCDHGB5, PCDHGB6, PINLYP, PPM1E, PRKD1, PROKR2, PRSS12, PRTG, PTCH1, RFX8, RP11-146B14.1, RP11-3P17.5, RP11-41O4.1, RP11-713N11.4, RP4-568B10.1, SERF1A, SEZ6L, SMURF1, TBC1D30, TCF12, TCP11, TM9SF3, TMPRSS15, TMSB15A, TNKS1BP1, TREM2, TTC28, PCDHGA9, FMNL1, or ZNF415 or a portion or fragment thereof.

[0160] In some embodiments, the sample is a blood sample. In certain embodiments, the sample is a serum sample. In some embodiments, the sample is a peripheral blood sample. In some embodiments, the blood sample contains, or is suspected of containing, at least one diseased cell or cancer cell. In particular embodiments, the diseased cell or cancer cell is a B cell. In some embodiments, the blood or serum sample contains one or more gene products of one or more genes listed in Table 1, Table 2, Table E2A, Table E2B, or table E4. In certain embodiments, the gene product is a polypeptide.

[0161] In certain embodiments, one or more gene products are measured, assessed, quantified or detected in a biological sample that is taken or is derived from blood, e.g., a plasma or serum sample. In certain embodiments, one or more proteins are measured. In particular embodiments, the one or more proteins are whole portions, and/or variations of, versions of, isoforms of, or fragments of proteins selected from ABCA9, ADAMTSL4, ADGRA2, ADGRF1, AK5, APOL1, ARHGAP27, ARID3B, CA6, CABP7, CCDC152, CCL17, CCR1, CCR6, CEP85L, CISH, CR2, ENAM, ENPP2, EPHA4, FTH1P11, FTH1P2, FTH1P8, GADD45A, GAS6, GBP3, GBP5, GBP6, GIMAP1-GIMAP5, GLI2, GPA33, GPRIN3, HSPA1A, IFITM1, IFITM3, IL15, IL2RA, JCHAIN, KIAA1257, LA16c-390H2.4, LAMB1, LDB3, LINC00623, LST1, LTB, LY6E, MAS1, MUC4, NLRC3, PLXNA4, PON2, PTGES3P1, PTP4A3, RNU1-1, RP11-345J4.6, RP11-421N8.1, RP11-51J9.5, RP11-51O6.1, RP11-552F3.9, RP11-686D22.9, RP11-723D22.3, RP11-723O4.6, RP13-512J5.1, RP4-620F22.2, RP5-940J5.9, RP6-109B7.5, RPL21P75, RYR2, SAMD9L, SEMA6A, SLC37A3, SNRPEP4, SOCS1, SPATS2L, SPON1, SV2C, TMEM154, TP53INP1, TNF, TRIM47, UST, WNT9A, ENG, SELE, ICAM3, or IL6R, or a portion or fragment thereof and/or are selected from ASAP2, ATP8B1, ATP9A, CCNA1, CDHR3, CECR2, CELF4, DLX1, DPYSL3, EHD4, FMNL2, GGA2, GPR176, HHIPL1, HOXA7, HMX3, IGF2BP1, IL3RA, IRX3, IRX5, KCNIP1, KIAA1644, LINC00092, LINC01483, MDFI, MIB1, MMP14, NOM1, OTOA, PCDHGA12, PCDHGA4, PCDHGA6, PCDHGB1, PCDHGBS, PCDHGB6, PINLYP, PPM1E, PRKD1, PROKR2, PRSS12, PRTG, PTCH1, RFX8, RP11-146B14.1, RP11-3P17.5, RP11-41O4.1, RP11-713N11.4, RP4-568B10.1, SERF1A, SEZ6L, SMURF1, TBC1D30, TCF12, TCP11, TM9SF3, TMPRSS15, TMSB15A, TNKS1BP1, TREM2, TTC28, PCDHGA9, FMNL1, or ZNF415 or a portion or fragment thereof. In certain embodiments, the one or more proteins measured in the biological sample taken are soluble, lack a transmembrane domain, and/or are cleaved at the cell surface. In certain embodiments, the one or more proteins are expressed on vascular endothelial cells and/or are associated with endothelial cell activation, vascular permeability and/or angiogenesis. In some embodiments, increased levels of the one or more proteins is associated with an increased risk of developing a toxicity or a severe form thereof, such as grade 3, grade 4, or higher neurotoxicity. In particular embodiments, the one or more proteins are whole portions, and/or variations of, versions of, isoforms of, or fragments of proteins selected from CCL17, ENG, SELE, ICAM3, and IL6R.

[0162] In some aspects, also provided herein are methods of measuring, assessing, determining, and/or quantifying the expression of one or a more gene products from a sample from a subject collected after the subject has received or been administered the immunotherapy, such as cell therapy, e.g. CAR-T cells. As shown herein, expression of certain gene products obtained from a sample from a subject subsequent to administration of the immunotherapy, such as cell therapy (e.g. CAR-T cells) is associated with and/or correlates with a risk of developing toxicity. In some aspects, the sample, e.g. serum or plasma sample, is obtained or collected from the subject within or about within 1 day, 2 days, 3 days, 4 days, 5 days, 6 days, 7 days, 8 days, 10 days, 12 days or 14 days after initiation of administration of the immunotherapy. In some aspects, the sample, e.g. serum or plasma sample, is obtained or collected from the subject no more than 4 days, such as no more than 3 days, no more than 2 days or no more than 1 day, after initiation of administration of the immunotherapy and/or before the subject exhibits a sign or symptom of the toxicity and/or before the subjects develops a sustained fever. In some embodiments, a gene product that is assessed in a sample from a subject collected after the subject has received or been administered the immunotherapy is selected from Endoglin, ICAM-3, CCL27, FAS, 1-309, NSE, P-Selectin, Resistin, S100β, Thrombomodulin and/or vWF, or a portion or fragment thereof. In some embodiments, such one or more gene products can be employed in provided methods to assess or monitor a risk of developing a toxicity, e.g. grade 3 or higher such as grade 4 or 5 neurotoxicity, subsequent to receiving the immunotherapy, such as cell therapy.

[0163] C. Measuring Gene Expression or Gene Products

[0164] In certain embodiments, the methods provided herein include one or more steps of assessing, measuring, determining, and/or quantifying the expression of one or more genes in a sample. In some embodiments, the expression of a gene, e.g., a gene with an expression that positively or negatively correlates with a risk for toxicity, is or includes assessing, measuring, determining, and/or quantifying a level, amount, or concentration of a gene product in the sample. In some embodiments, gene expression is or includes a process by which information of the gene is used in the synthesis of a gene product. Thus, in some embodiments, a gene product is any biomolecule that is assembled, generated, and/or synthesized with information encoded by a gene, and may include polynucleotides and/or polypeptides. In particular embodiments, assessing, measuring, and/or determining gene expression is or includes determining or measuring the level, amount, or concentration of the gene product. In certain embodiments, the level, amount, or concentration of the gene product may be transformed (e.g., normalized) or directly analyzed (e.g., raw). In some embodiments, the gene product is a protein that is encoded by the gene. In certain embodiments, the gene product is a polynucleotide, e.g., an mRNA or a protein, that is encoded by the gene.

[0165] In some embodiments, the gene product is a polynucleotide that is expressed by and/or encoded by the gene. In certain embodiments, the polynucleotide is an RNA. In some embodiments, the gene product is a messenger RNA (mRNA), a transfer RNA (tRNA), a ribosomal RNA, a small nuclear RNA, a small nucleolar RNA, an antisense RNA, long non-coding RNA, a microRNA, a Piwi-interacting RNA, a small interfering RNA, and/or a short hairpin RNA. In particular embodiments, the gene product is an mRNA.

[0166] In particular embodiments, the amount or level of a polynucleotide in a sample may be assessed, measured, determined, and/or quantified by any suitable means known in the art. For example, in some embodiments, the amount or level of a polynucleotide gene product can be assessed, measured, determined, and/or quantified by polymerase chain reaction (PCR), including reverse transcriptase (rt) PCR, droplet digital PCR, real-time and quantitative PCR (qPCR) methods (including, e.g., TAQMAN®, molecular beacon, LIGHTUP™, SCORPION™ SIMPLEPROBES®; see, e.g., U.S. Pat. Nos.5,538,848; 5,925,517; 6,174,670; 6,329,144; 6,326,145 and 6,635,427); northern blotting; Southern blotting, e.g., of reverse transcription products and derivatives; array based methods, including blotted arrays, microarrays, or in situ-synthesized arrays; and sequencing, e.g., sequencing by synthesis, pyrosequencing, dideoxy sequencing, or sequencing by ligation, or any other methods known in the art, such as discussed in Shendure et al., Nat. Rev. Genet. 5:335-44 (2004) or Nowrousian, Euk. Cell 9(9): 1300-1310 (2010), including such specific platforms as HELICOS®, ROCHE® 454, ILLUMINA®/SOLEXA®, ABI SOLiD®, and POLONATOR® sequencing. In particular embodiments, the levels of nucleic acid gene products are measured by quantitative PCR (qPCR) methods, such qRT-PCR. In some embodiments, the qRT-PCR uses three nucleic acid sets for each gene, where the three nucleic acids comprise a primer pair together with a probe that binds between the regions of a target nucleic acid where the primers bind—known commercially as a TAQMAN® assay.

[0167] In particular embodiments, assessing, measuring, determining, and/or quantifying amount or level of an RNA gene product includes a step of generating, polymerizing, and/or deriving a cDNA polynucleotide and/or a cDNA oligonucleotide from the RNA gene product. In certain embodiments, the RNA gene product is assessed, measured, determined, and/or quantified by directly assessing, measuring, determining, and/or quantifying a cDNA polynucleotide and/or a cDNA oligonucleotide that is derived from the RNA gene product.

[0168] In some embodiments, one or more oligonucleotide primers is contacted to an RNA gene product and/or a cDNA polynucleotide or oligonucleotide derived from the RNA gene product, to assess, measure, determine, and/or quantify the level, amount, or concentration of the RNA gene product. In some embodiments, provided herein are oligonucleotide primers that are suitable for assessing, measuring, detecting, and/or quantifying the level, amount, or concentration of an RNA gene product (or a cDNA derived therefrom). In certain embodiments, the oligonucleotide primers hybridize, and/or are capable of hybridizing to an RNA gene product and/or a cDNA derived therefrom. In certain embodiments, the oligonucleotide hybridizes and/or is capable of hybridizing to an RNA gene product, or cDNA derived therefrom, that is expressed and/or encoded by a gene listed in Table 1 or Table 2. In particular embodiments, the oligonucleotide primer hybridizes and/or is capable of hybridizing to an RNA gene product, a portion or partial transcript thereof, or a cDNA derived therefrom, that is at least 75%, 80%, 85%, 90%, 95%, 97%, 98%, 99%, about 100%, or 100% identical to a nucleotide sequence set forth in SEQ ID NOS: 1-48. In some embodiments, sets of oligonucleotide primers may be prepared for any of RNA gene products that are encoded by any of the genes listed in Table 1 or Table 2, or described anywhere in the application. In some embodiments, the oligonucleotide primers can readily be designed using ordinary skill in the art of molecular biology to arrive at primers that are specific for a given RNA gene product. In some embodiments, the oligonucleotide primer has a length of about 10-100 nucleotides, e.g., about 10, 11, 12, 13, 14, 15, 16, 17, 18, 19, 20, 21, 22, 23, 24, 25, 26, 27, 28, 29, 30, 35, 40, 45, 50, 55, 60, 70, 80, 90, 100 nucleotides, or more) and a sequence (i.e., the particular portion of a sequence set for in SEQ ID NOS: 1-48, or a portion complementary thereto) of the primers can readily be adjusted to achieve a desired melting temperature (“Tm”; e.g., about 45-72° C., e.g., about 45, 50, 55, 60, 65, 70, 72° C. or more) and specificity. One of skill in the art will readily account for factors such as secondary structures, primer dimers, salt concentrations, nucleic acid concentrations, et cetera. Oligonucleotide primers provided herein may consist of (or consist essentially of) naturally occurring deoxribonucleotides or, optionally, may include modifications such as non-natural nucleotides, artificial backbones (such as PNAs), and detectable labels, such as florescent labels. In particular embodiments, a florescent label is attached, e.g., covalently attached, to the oligonucleotide primer.

[0169] In particular embodiments, the expression of two or more of the genes are measured or assessed simultaneously. In certain embodiments, a multiplex PCR, e.g., a multiplex rt-PCR assessing or a multiplex quantitative PCR (qPCR) for, measuring, determining, and/or quantifying the level, amount, or concentration of two or more gene products. In some embodiments, microarrays (e.g., AFFYMETRIX®, AGILENT® and ILLUMINA®-style arrays) are used for assessing, measuring, determining, and/or quantifying the level, amount, or concentration of two or more gene products. In some embodiments, microarrays are used for assessing, measuring, determining, and/or quantifying the level, amount, or concentration of a cDNA polynucleotide that is derived from an RNA gene product.

[0170] In some embodiments, the expression of one or more gene products, e.g., polynucleotide gene products, is determined by sequencing the gene product and/or by sequencing a cDNA polynucleotide that is derived from the from the gene product. In some embodiments, the sequencing is performed by a non-Sanger sequencing method and/or a next generation sequencing (NGS) technique. Examples of Next Generation Sequencing techniques include, but are not limited to Massively Parallel Signature Sequencing (MPSS), Polony sequencing, pyrosequencing, Reversible dye-terminator sequencing, SOLiD sequencing, Ion semiconductor sequencing, DNA nanoball sequencing, Helioscope single molecule sequencing, Single molecule real time (SMRT) sequencing, Single molecule real time (RNAP) sequencing, and Nanopore DNA sequencing.

[0171] In some embodiments, the NGS technique is RNA sequencing (RNA-Seq). In particular embodiments, the expression of the one or more polynucleotide gene products is measured, determined, and/or quantified by RNA-Seq. RNA-Seq, also called whole transcriptome shotgun sequencing determines the presence and quantity of RNA in a sample. RNA sequencing methods have been adapted for the most common DNA sequencing platforms [HiSeq systems (IIlumina), 454 Genome Sequencer FLX System (Roche), Applied Biosystems SOLiD (Life Technologies), IonTorrent (Life Technologies)]. These platforms require initial reverse transcription of RNA into cDNA. Conversely, the single molecule sequencer HeliScope (Helicos BioSciences) is able to use RNA as a template for sequencing. A proof of principle for direct RNA sequencing on the PacBio RS platform has also been demonstrated (Pacific Bioscience). In some embodiments, the one or more RNA gene products are assessed, measured, determined, and/or quantified by RNA-seq.

[0172] In some embodiments, the RNA-seq is a tag-based RNA-seq. In tag-based methods, each transcript is represented by a unique tag. Initially, tag-based approaches were developed as a sequence-based method to measure transcript abundance and identify differentially expressed genes, assuming that the number of tags (counts) directly corresponds to the abundance of the mRNA molecules. The reduced complexity of the sample, obtained by sequencing a defined region, was essential to make the Sanger-based methods affordable. When NGS technology became available, the high number of reads that could be generated facilitated differential gene expression analysis. A transcript length bias in the quantification of gene expression levels, such as observed for shotgun methods, is not encountered in tag-based methods. All tag-based methods are by definition strand specific. In particular embodiments, the one or more RNA gene products are assessed, measured, determined, and/or quantified by tag-based RNA-seq.

[0173] In some embodiments, the RNA-seq is a shotgun RNA-seq. Numerous protocols have been described for shotgun RNA-seq, but they have many steps in common: fragmentation (which can occur at RNA level or cDNA level, conversion of the RNA into cDNA (performed by oligo dT or random primers), second-strand synthesis, ligation of adapter sequences at the 3′ and 5′ ends (at RNA or DNA level) and final amplification. In some embodiments, RNA-seq can focus only on polyadenylated RNA molecules (mainly mRNAs but also some lncRNA, snoRNA, pseudogenes and histones) if poly(A)⁺ RNAs are selected prior to fragmentation, or may also include non-polyadenylated RNAs if no selection is performed. In the latter case, ribosomal RNA (more than 80% of the total RNA pool) needs to be depleted prior to fragmentation. It is, therefore, clear that differences in capturing of the mRNA part of the transcriptome lead to a partial overlap in the type of detected transcripts. Moreover, different protocols may affect the abundance and the distribution of the sequenced reads. This makes it difficult to compare results from experiments with different library preparation protocols.

[0174] In some embodiments, RNA from each sample, such as each BMA sample, is obtained, fragmented and used to generate complementary DNA (cDNA) samples, such as cDNA libraries for sequencing Reads may be processed and aligned to the human genome and the expected number of mappings per gene/isoform are estimated and used to determine read counts. In some embodiments, read counts are normalized by the length of the genes/isoforms and number of reads in a library to yield FPKM normalized, e.g., by length of the genes/isoforms and number of reads in the library, to yield fragments per kilobase of exon per million mapped reads (FPKM) according to the gene length and total mapped reads. In some aspects, between—sample normalization is achieved by normalization, such as 75th quantile normalization, where each sample is scaled by the median of 75th quantiles from all samples, e.g., to yield quantile-normalized FPKM (FPKQ) values. The FPKQ values may be log-transformed (log 2).

[0175] In some embodiments, techniques and methods involving nucleotide aptamers are used to measure, assess, quantify, and/or determine the level, amount, or concentration of a polynucleotide gene product. Suitable nucleotide aptamers are known, and include those described in Cox and Ellington, Bioorganic & Medicinal Chemistry. (2001) 9 (10): 2525-2531; Cox et al., Combinatorial Chemistry & High Throughput Screening. (2002) 5 (4): 289-29; Cox et al., Nucleic Acids Research. (2002) 30(20): e108.

[0176] In some embodiments, RNA-seq is performed to sequence total RNA, e.g., the total RNA of a sample. In particular embodiments, the RNA-seq is performed to sequence one or more of mRNA, tRNA, ribosomal RNA, small nuclear RNA, small nucleolar RNA, antisense RNA, long non-coding RNA, microRNA, Piwi-interacting RNA, small interfering RNA, and/or a short hairpin RNA. In certain embodiments, the RNA-seq is performed to sequence only mRNA, tRNA, ribosomal RNA, small nuclear RNA, small nucleolar RNA, antisense RNA, long non-coding RNA, microRNA, Piwi-interacting RNA, small interfering RNA, and/or a short hairpin RNA. In particular embodiments, the RNA-seq is performed to sequence mRNA gene products.

[0177] In some embodiments, the gene product is or includes a protein, i.e., a polypeptide, that is encoded by and/or expressed by the gene. In particular embodiments, the gene product encodes a protein that is localized and/or exposed on the surface of a cell. In some embodiments, the protein is a soluble protein. In certain embodiments, the protein is secreted by a cell.

[0178] In particular embodiments, the gene expression is the amount, level, and/or concentration of a protein that is encoded by the gene. In certain embodiments, one or more protein gene products are measured by any suitable means known in the art. Suitable methods for assessing, measuring, determining, and/or quantifying the level, amount, or concentration or more or more protein gene products include, but are not limited to detection with immunoassays, nucleic acid-based or protein-based aptamer techniques, HPLC (high precision liquid chromatography), peptide sequencing (such as Edman degradation sequencing or mass spectrometry (such as MS/MS), optionally coupled to HPLC), and microarray adaptations of any of the foregoing (including nucleic acid, antibody or protein-protein (i.e., non-antibody) arrays). In some embodiments, the immunoassay is or includes methods or assays that detect proteins based on an immunological reaction, e.g., by detecting the binding of an antibody or antigen binding antibody fragment to a gene product. Immunoassays include, but are not limited to, quantitative immunocytochemisty or immunohistochemisty, ELISA (including direct, indirect, sandwich, competitive, multiple and portable ELISAs (see, e.g., U.S. Pat. No. 7,510,687), western blotting (including one, two or higher dimensional blotting or other chromatographic means, optionally including peptide sequencing), enzyme immunoassay (EIA), RIA (radioimmunoassay), and SPR (surface plasmon resonance).

[0179] In some embodiments, the gene expression product is a protein. In particular embodiments, the gene expression product is a fraction, portion, variant, version, and/or isoform of a protein, e.g., a protein encoded by a gene listed Table 1, Table 2, Table 3, Table E2A, and/or Table E2B. In particular embodiments, the fraction, portion, variant, version, and/or isoform of the protein is soluble. In some embodiments, the fraction, portion, variant, version, and/or isoform of the protein lacks a transmembrane domain. In certain embodiments, the fraction, portion, variant, version, and/or isoform of a protein is not expressed on or within the surface of a cell. In some embodiments, the fraction, portion, variant, version, and/or isoform of the protein has been cleaved from the surface of a cell.

[0180] The practice of the methods, kits, and compositions provided herein may also employ conventional biology methods, software and systems. For example, means for measuring the expression level of transcripts or partial transcripts of genes, e.g., genes listed in Table 1, Table 2, Table 3, Table E2A, and/or Table E2B; means for correlating the expression level with a classification of risk, probability, and/or likelihood of toxicity following administration of and/or associated with the therapy; and means for outputting the risk, probability, and/or likelihood may employ conventional biology methods, software and systems as described herein or as otherwise known. Computer software products for use with the provided methods, compositions, and kits, typically include computer readable medium having computer-executable instructions for performing the logic steps of the method of the invention. Suitable computer readable medium include floppy disk, CD-ROM/DVD/DVD-ROM, hard-disk drive, flash memory, ROM/RAM, magnetic tapes and etc. The computer executable instructions may be written in a suitable computer language or combination of several languages. Basic computational biology methods are described in, for example Setubal and Meidanis et al., Introduction to Computational Biology Methods (PWS Publishing Company, Boston, 1997); Salzberg, Searles, Kasif, (Ed.), Computational Methods in Molecular Biology, (Elsevier, Amsterdam, 1998); Rashidi and Buehler, Bioinformatics Basics: Application in Biological Science and Medicine (CRC Press, London, 2000) and Ouelette and Bzevanis Bioinformatics: A Practical Guide for Analysis of Gene and Proteins (Wiley & Sons, Inc., 2.sup.nd ed., 2001). See U.S. Pat. No. 6,420,108.

[0181] In some embodiments, the methods provided herein include a step of assessing one or more genes in a sample by assessing, measuring, determining, and/or quantifying the amount of the corresponding one or more gene products in the sample. In certain embodiments, the expression of one or more genes in a sample that negatively correlates and/or is negatively associated with a toxicity, e.g., neurotoxicity or severe neurotoxicity, is measured by determining the amount or level of one of more corresponding gene products in the sample. In certain embodiments, the gene expression in a sample is the level, amount, or concentration of a gene product that is encoded by the gene.

[0182] In particular embodiments, the expression of one or more genes that negatively correlate and/or are negatively associated with a toxicity, e.g., neurotoxicity or severe neurotoxicity, are measured in a sample. In some embodiments, the expression of one or more genes that negatively correlate and/or are negatively associated with a toxicity is assessed, measured, determined, and/or quantified by determining the amount or level of a product encoded, produced, and/or expressed by the gene. In some embodiments, the one or more gene products are encoded, produced, and/or expressed by one or more genes listed in Table 1 and/or Table E2A. In certain embodiments, the gene product is one of two or more isoforms that are encoded by a gene. In particular embodiments, the one or more gene products are products of one or more of ADGRF1, CA6, CCL17, CCR6, ENAM, GAS6, GBP5, GLI2, IFITM1, IGJ (JCHAIN), MUC4, PON2, PTP4A3, SEMA6A, SLC37A3, SPATS2L, TMEM154, TP53INP1, IL2RA, or WNT9A or a portion thereof. In some embodiments, the one or more gene product is a product of IGJ (JCHAIN), MUC4, CA6, WNT9A, ADGRF1 or CCL17, or a portion thereof. In various embodiments, the one or more gene products are products of one or more of CCL17, CA6, JCHAIN, PTP4A3, IFITM1, CRLF2, ENAM, GBP5, ABCA9, SV2C, SLC37A3, IL15, IL2RA, and SEMA6A or a portion thereof. In some embodiments, the one or more gene product is a product of IGJ (JCHAIN), MUC4, CA6, WNT9A, ADGRF1 or CCL17 or a portion thereof.

[0183] In particular embodiments, the expression of one or more genes that negatively correlate and/or are negatively associated with a toxicity are assessed, measured, determined, and/or quantified by determining the amount or level of an RNA product encoded, produced, and/or expressed by the one or more genes. In certain embodiments, the gene product is an mRNA. In certain embodiments, the one or more gene products are mRNA produced or encoded by one or more genes listed in Table 1 and/or Table E2A. In some embodiments, the one or more gene products are mRNA product encoded by one or more of ADGRF1, CA6, CCL17, CCR6, ENAM, GAS6, GBP5, GLI2, IFITM1, IGJ (JCHAIN), MUC4, PON2, PTP4A3, SEMA6A, SLC37A3, SPATS2L, TMEM154, TP53INP1, IL2RA, or WNT9A. In some embodiments, the one or more gene products are mRNA produced or encoded by one or more of IGJ (JCHAIN), MUC4, CA6, WNT9A, ADGRF1 or CCL17.

[0184] In some embodiments, the one or more products or gene products are one or more mRNA with at least 15, at least 20, at least 25, at least 50, at least 75, at least 100, at least 150, at least 200, at least 250, at least 300, at least 350, at least 400, at least 450, at least 500, or at least 1,000 contiguous nucleotides of one or more sequences that are at least 75%, at least 80%, at least 85%, at least 90%, at least 95%, at least 97%, at least 98%, at least 99%, or at least 99.5% identical to one or more sequences set forth in SEQ ID NOS: 1-29 or 97-99. In particular embodiments, the one or more products or gene products are one or more mRNA with at least 15, at least 20, at least 25, at least 50, at least 75, at least 100, at least 150, at least 200, at least 250, at least 300, at least 350, at least 400, at least 450, at least 500, or at least 1,000 contiguous nucleotides of one or more sequences set forth in SEQ ID NOS: 1-29 or 97-99. In particular embodiments, the one or more products or gene products are mRNA that are at least 75%, at least 80%, at least 85%, at least 90%, at least 95%, at least 97%, at least 98%, at least 99%, or at least 99.5% identical to one or more sequences set forth in SEQ ID NOS: 1-29 or 97-99. In some embodiments, the gene products are one or more mRNA or a portion or a partial transcript thereof of one or more sequences that are set forth in SEQ ID NOS: 1-29 or 97-99. In particular embodiments, the one or more gene products are mRNA of one or more sequences that are set forth in SEQ ID NOS: 1-29 or 97-99.

[0185] In particular embodiments, the expression of one or more genes that negatively correlate and/or are negatively associated with a toxicity are assessed, measured, determined, and/or quantified by determining the amount or level of a protein encoded by or expressed by the one or more genes. In some embodiments, the one or more gene products are proteins, or portions or variants thereof, that are encoded, produced, and/or expressed by one or more genes listed in Table 1 and/or Table E2A. In some embodiments, the one or more gene products are proteins encoded by one or more genes selected from ADGRF1, CA6, CCL17, CCR6, ENAM, GAS6, GBP5, GLI2, IFITM1, IGJ (JCHAIN), MUC4, PON2, PTP4A3, SEMA6A, SLC37A3, SPATS2L, TMEM154, TP53INP1, IL2RA, or WNT9A. In some embodiments, the one or more proteins are encoded by one or more genes selected from IGJ (JCHAIN), MUC4, CA6, WNT9A, ADGRF1 or CCL17.

[0186] In some embodiments, the one or more gene products are proteins encoded by one or more genes selected from CCL17, CA6, JCHAIN, PTP4A3, IFITM1, CRLF2, ENAM, GBP5, ABCA9, SV2C, SLC37A3, IL15, IL2RA, and SEMA6A. In some embodiments, the one or more proteins are encoded by one or more genes selected from PCDHGA12, PCDHGB6, PCDHGBS, PCDHGA9, PINLYP, ASAP2, TTC28, PTCH1, and FMNL1.

[0187] In some embodiments, the one or more products or gene products are proteins with at least 15, at least 20, at least 25, at least 50, at least 75, at least 100, at least 125, at least 150, at least 175, at least 200, at least 250, at least 300, at least 350, at least 400, at least 450, or at least 500 contiguous amino acids of one or more polypeptide sequences that are at least 75%, at least 80%, at least 85%, at least 90%, at least 95%, at least 97%, at least 98%, at least 99%, or at least 99.5% identical to a polypeptide sequence set forth in SEQ ID NOS: 49-77 and 120-122. In particular embodiments, the one or more products or gene products are proteins with at least 15, at least 20, at least 25, at least 50, at least 75, at least 100, at least 125, at least 150, at least 175, at least 200, at least 250, at least 300, at least 350, at least 400, at least 450, or at least 500 contiguous amino acids of a polypeptide sequence set forth in SEQ ID NOS: 49-77 and 120-122. In certain embodiments, the one or more products or gene products are proteins that are at least 75%, at least 80%, at least 85%, at least 90%, at least 95%, at least 97%, at least 98%, at least 99%, or at least 99.5% identical to a polypeptide sequence set forth in SEQ ID NOS: 49-77 and 120-122. In some embodiments, the one or more gene products are proteins with one or more polypeptide sequences set forth in SEQ ID NOS: 49-77 and 120-122.

[0188] In particular embodiments, the expression of one or more genes that positively correlate and/or are positively associated with a toxicity, e.g., neurotoxicity or severe neurotoxicity, are measured in a sample. In some embodiments, the expression of one or more gene that positively correlate and/or are positively associated with a toxicity are assessed, measured, determined, and/or quantified by determining the amount or level of a product encoded, produced, and/or expressed by the gene. In some embodiments, the one or more gene products are encoded, produced, and/or expressed by a gene listed in Table 2 or Table E2B. In certain embodiments, the gene product is one of two or more isoforms that are encoded by a gene. In particular embodiments, the one or more gene products are products of one or more ASAP2, FMNL2, GPR176, MDFI, PCDHGA12, PCDHGA6, PCDHGB5, PCDHGB6, PINLYP, PTCH1, ATP9A, HMX3, DPYSL3, ZNF415, IRX5, TMPRSS15, IL3RA, IGF2BP1, or TTC28. In certain embodiments, the one or more gene products are products of one or more of PINLYP, ASAP2, FMNL2, PTCH1, TTC28, PCDHGA6, PCDHGB6 or PCDHGA12. In certain embodiments, the one or more gene products are a product of PINLYP or PCDHGA12.

[0189] In particular embodiments, the expression of one or more genes that positively correlate and/or are positively associated with a toxicity are assessed, measured, determined, and/or quantified by determining the amount or level of an RNA product encoded, produced, and/or expressed by the one or more genes. In certain embodiments, the one or more gene products are one or more of an mRNA or a portion or partial transcript thereof of one or more genes listed in Table 2 and/or Table E2B. In certain embodiments, the one or more genes product are mRNA or a portion or partial transcript thereof that are produced or encoded by one or more of ASAP2, FMNL2, GPR176, MDFI, PCDHGA12, PCDHGA6, PCDHGB5, PCDHGB6, PINLYP, PTCH1, ATP9A, HMX3, DPYSL3, ZNF415, IRX5, TMPRSS15, IL3RA, IGF2BP1, or TTC28. In some embodiments, the one or more gene products are mRNA or a portion or partial transcript thereof that are produced or encoded by one or more of PINLYP, ASAP2, FMNL2, PTCH1, TTC28, PCDHGA6, PCDHGB6 or PCDHGA12. In certain embodiments, the one or more genes product are mRNA or a portion or partial transcript thereof that are produced or encoded by one or more of PINLYP or PCDHGA12.

[0190] In some embodiments, the one or more gene products are mRNA with at least 15, at least 20, at least 25, at least 50, at least 75, at least 100, at least 150, at least 200, at least 250, at least 300, at least 350, at least 400, at least 450, at least 500, or at least 1,000 contiguous nucleotides of a sequence that is at least 75%, at least 80%, at least 85%, at least 90%, at least 95%, at least 97%, at least 98%, at least 99%, or at least 99.5% identical to one or more sequences set forth in SEQ ID NOS: 30-48, 100-119, 143-144. In particular embodiments, the one or more gene products are mRNA with at least 15, at least 20, at least 25, at least 50, at least 75, at least 100, at least 150, at least 200, at least 250, at least 300, at least 350, at least 400, at least 450, at least 500, or at least 1,000 contiguous nucleotides of one or more sequences set forth in SEQ ID NOS: 30-48, 100-119, 143-144. In some embodiments, the one or more gene products are mRNA that is at least 75%, at least 80%, at least 85%, at least 90%, at least 95%, at least 97%, at least 98%, at least 99%, or at least 99.5% identical to a sequence set forth in SEQ ID NOS: 30-48, 100-119, 143-144. In certain embodiments, the one or more gene products are an mRNA or a portion or partial transcription of a sequence set forth in SEQ ID NOS: 30-48, 100-119, 143-144. In some embodiments, the one or more gene products are RNA with a sequence set forth in SEQ ID NOS: 30-48, 100-119, 143-144.

[0191] In particular embodiments, the expression of one or more genes that positively correlate and/or are positively associated with a toxicity are assessed, measured, determined, and/or quantified by determining the amount or level of a protein encoded by or expressed by the gene. In some embodiments, the gene product is a protein encoded, produced, and/or expressed by a gene listed in Table 2 and/or Table E2B. In some embodiments, the gene product is a protein encoded, produced, and/or expressed by ASAP2, FMNL2, GPR176, MDFI, PCDHGA12, PCDHGA6, PCDHGBS, PCDHGB6, PINLYP, PTCH1, ATP9A, HMX3, DPYSL3, ZNF415, IRX5, TMPRSS15, IL3RA, IGF2BP1, or TTC28. PINLYP, ASAP2, FMNL2, PTCH1, TTC28, PCDHGA6, PCDHGB6 or PCDHGA12. In certain embodiments, the one or more genes product are mRNA or a portion or partial transcript thereof that is produced or encoded by one or more of PINLYP or PCDHGA12.

[0192] In certain embodiments, the one or more gene products are one or more proteins with at least 15, at least 20, at least 25, at least 50, at least 75, at least 100, at least 125, at least 150, at least 175, at least 200, at least 250, at least 300, at least 350, at least 400, at least 450, or at least 500 contiguous amino acids of one or more polypeptide sequences that are at least 75%, at least 80%, at least 85%, at least 90%, at least 95%, at least 97%, at least 98%, at least 99%, or at least 99.5% identical to a polypeptide sequence set forth in SEQ ID NOS: 78-96, 123-142, or 145-146. In particular embodiments, the one or more gene products are one or more proteins with at least 15, at least 20, at least 25, at least 50, at least 75, at least 100, at least 125, at least 150, at least 175, at least 200, at least 250, at least 300, at least 350, at least 400, at least 450, or at least 500 contiguous amino acids of one or more polypeptide sequences set forth in SEQ ID NOS: 78-96, 123-142, or 145-146. In some embodiments, the one or more gene products are a protein that is at least 75%, at least 80%, at least 85%, at least 90%, at least 95%, at least 97%, at least 98%, at least 99%, or at least 99.5% identical to a polypeptide sequence set forth in SEQ ID NOS: 78-96, 123-142, or 145-146. In some embodiments, the one or more gene product are proteins or a portions of one or more polypeptide sequences set forth in SEQ ID NOS: 78-96, 123-142, or 145-146. In certain embodiments, the one or more gene products are one or more proteins with a polypeptide sequence set forth in SEQ ID NOS: 78-96, 123-142, or 145-146.

[0193] In certain embodiments, one or more gene products of gene that negatively correlate and/or are negatively associated with toxicity following administration of a therapy, e.g., an immunotherapy and/or a cell therapy, and one or more genes that are positively correlated and/or are positively associated with the therapy are measured in a sample. In certain embodiments, the gene products of one or more genes listed in Table 1 and/or Table E2A and one or more genes listed in Table 2 and/or Table E2A are measured in a sample. In some embodiments, one or more gene products of ABCA9, ADAMTSL4, ADGRA2, ADGRF1, AKS, APOL1, ARHGAP27, ARID3B, CA6, CABP7, CCDC152, CCL17, CCR1, CCR6, CEP85L, CISH, CR2, ENAM, ENPP2, EPHA4, FTH1P11, FTH1P2, FTH1P8, GADD45A, GAS6, GBP3, GBP5, GBP6, GIMAP1-GIMAPS, GLI2, GPA33, GPRIN3, HSPA1A, IFITM1, IFITM3, IL15, IL2RA, JCHAIN, KIAA1257, LA16c-390H2.4, LAMB1, LDB3, LINC00623, LST1, LTB, LY6E, MAS1, MUC4, NLRC3, PLXNA4, PON2, PTGES3P1, PTP4A3, RNU1-1, RP11-345J4.6, RP11-421N8.1, RP11-51J9.5, RP11-51O6.1, RP11-552F3.9, RP11-686D22.9, RP11-723D22.3, RP11-723O4.6, RP13-512J5.1, RP4-620F22.2, RP5-940J5.9, RP6-109B7.5, RPL21P75, RYR2, SAMD9L, SEMA6A, SLC37A3, SNRPEP4, SOCS1, SPATS2L, SPON1, SV2C, TMEM154, TP53INP1, TNF, TRIM47, UST, WNT9A, ENG, SELE, ICAM3, or IL6R, and one or more gene products of ASAP2, ATP8B1, ATP9A, CCNA1, CDHR3, CECR2, CELF4, DLX1, DPYSL3, EHD4, FMNL2, GGA2, GPR176, HHIPL1, HOXA7, HMX3, IGF2BP1, IL3RA, IRX3, IRX5, KCNIP1, KIAA1644, LINC00092, LINC01483, MDFI, MIB1, MMP14, NOM1, OTOA, PCDHGA12, PCDHGA4, PCDHGA6, PCDHGB1, PCDHGBS, PCDHGB6, PINLYP, PPM1E, PRKD1, PROKR2, PRSS12, PRTG, PTCH1, RFX8, RP11-146B14.1, RP11-3P17.5, RP11-41O4.1, RP11-713N11.4, RP4-568B10.1, SERF1A, SEZ6L, SMURF1, TBC1D30, TCF12, TCP11, TM9SF3, TMPRSS15, TMSB15A, TNKS1BP1, TREM2, TTC28, PCDHGA9, FMNL1, or ZNF415 are measured in a sample.

[0194] In some embodiments, one or more gene products expressed by ADGRF1, CA6, CCL17, CCR6, ENAM, GAS6, GBP5, GLI2, IFITM1, IGJ (JCHAIN), MUC4, PON2, PTP4A3, SEMA6A, SLC37A3, SPATS2L, TMEM154, TP53INP1, IL2RA, or WNT9A and one or more gene products expressed by ASAP2, FMNL2, GPR176, MDFI, PCDHGA12, PCDHGA6, PCDHGBS, PCDHGB6, PINLYP, PTCH1, ATP9A, HMX3, DPYSL3, ZNF415, IRX5, TMPRSS15, IL3RA, IGF2BP1, or TTC28 are measured in a sample. In various embodiments, one or more gene products expressed by CCL17, CA6, JCHAIN, PTP4A3, IFITM1, CRLF2, ENAM, GBP5, ABCA9, SV2C, SLC37A3, IL15, IL2RA, and SEMA6A and one or more gene products expressed by PCDHGA12, PCDHGB6, PCDHGB5, PCDHGA9, PINLYP, ASAP2, TTC28, PTCH1, and FMNL1 are measured in a sample. In certain embodiments, one or more gene products expressed by IGJ (JCHAIN), MUC4, CA6, WNT9A, ADGRF1 or CCL17 and one or more gene products expressed by PINLYP, ASAP2, FMNL2, PTCH1, TTC28, PCDHGA6, PCDHGB6 or PCDHGA12 are measured in a sample. In particular embodiments, one or more gene products expressed by IGJ (JCHAIN), MUC4, CA6, WNT9A, ADGRF1 or CCL17 and one or more gene products expressed by PINLYP or PCDHGA12 are measured in a sample.

[0195] In some embodiments, measuring, assessing, determining, and/or quantifying one or more of the gene products in a sample is not predictive, and/or is not associated or correlated with toxicity, e.g., neurotoxicity, at the time at which the sample is collected from the subject. In some embodiments, the gene expression profile of any of the genes listed in Table 1, Table 2, Table 3, Table E2A, Table E2B, or Table E4, are not predictive, correlated with, and/or associated with toxicity when the sample is collected during or after the subject has received treatment with an immunotherapy, e.g., a cell therapy containing CAR-T cells.

[0196] 1. Normalization to Control Values

[0197] In some embodiments, the assessment, determination, measurement, and/or quantification of a gene product, e.g., an RNA or protein gene product, of a sample is normalized to a control value. In certain embodiments, normalization to one or more control values may be performed to analyze, assess, or determine if an amount or level of the gene product indicates if the expression of the gene is elevated or decreased, and/or high or low. In particular embodiments, normalization to control values may be used to compare the gene expression of a gene a sample to the gene expression of a different sample.

[0198] In particular embodiments, the control value is a measurement, or a value of a measurement, of a different gene product. In some embodiments, the different gene product is a gene product of a housekeeping gene. In certain embodiments, the housekeeping gene is a constitutively active gene, e.g., a gene that is required for maintenance of basic cellular function. Examples of suitable housekeeping genes are known in the art, and include, but are not limited to, genes encoding ACTB (Beta-actin), B2M (Beta-2-microglobulin), GAPDH (Glyceraldehyde 3-phosphate dehydrogenase), RPLP0 (60S acidic ribosomal protein P0), GUSB (beta-glucuronidase), HMBS (Hydroxymethyl-bilane synthase), HPRT1 (Hypoxanthine phosphoribosyl-transferase 1), RPL13A (Ribosomal protein L13a), SDHA, succinate dehydrogenase complex subunit A), TBP (TATA box binding protein), TFRC (transferring receptor 1), and UBC (Ubiquitin C). In some embodiments, the control value is measured in the same sample as the gene product.

[0199] In certain embodiments, the gene product is compared and/or normalized to a control value that is a measurement, or a value of a measurement, of the gene product from the same gene. In some embodiments, the control value is a measurement, or a value of a measurement, that is obtained from one or more control samples. In certain embodiments, the gene product and the control value are measured in different samples. In some embodiments, the one or more control samples have an identical, a same, or a similar tissue composition and/or cellular composition as the sample. In some embodiments, the sample and control sample are different samples from the same, similar, and/or identical tissue from the same subject. In particular embodiments, the sample and the control sample different samples from the same tissue in different subjects. In particular embodiments, the sample and control sample are different samples from the same, similar, and/or identical tissue from different subjects. In certain embodiments, the control sample is obtained from a subject that does not have a condition and/or a cancer. In particular embodiments, the control sample is obtained from a subject that does not have ALL. In some embodiments, the control sample does not have and/or is not suspected of having one or more tumor cells. In particular embodiments, the control sample does not have and/or is not suspected of having one or more tumor cells. In some embodiments, the one or more samples are bone marrow samples and the one or more control samples are bone marrow samples. In particular embodiments, the one or more samples are blood samples, e.g., peripheral blood samples, and the one or more control samples are blood samples.

[0200] In certain embodiments, the assessment, determination, measurement, and/or quantification of a gene product, e.g., an RNA or protein gene product, of a sample is normalized to and/or compared to two or more control values. In some embodiments, the two or more control values include a control value that is a measurement, or a value of a measurement, that of the same gene product and a control value that is a measurement, or a value of a measurement, that of a different gene product.

[0201] In some embodiments, the control value has been previous determined. In certain embodiments, the one or more control values are measured or obtained in parallel with the assessment, measurement, determination, and/or quantification of the one or gene products in the sample.

[0202] In particular embodiments, the control value is an average or a median amount or level of expression of the one or more gene products obtained from a plurality of control samples. In some embodiments, the plurality of control samples is obtained from individual control subjects. In particular embodiments, the plurality of individual control subjects are subjects that do not have and/or are not suspected of having a condition or a disease. In some embodiments, the plurality of individual control subjects are subjects that do not have and/or are not suspected of having a cancer. In some embodiments, the plurality of individual control subjects are subjects that do not have and/or are not suspected of having ALL. In some embodiments, the plurality of individual control subjects are subjects that do not have and/or are not suspected of having a specific subtype of ALL. In particular embodiments, the subtype of ALL is the Philadelphia-like (Ph-like) subtype of ALL.

[0203] In certain embodiments, the plurality of individual control subjects is a plurality of subjects that have and/or are suspected of having a cancer. In some embodiments, the plurality of individual control subjects is or includes subjects that have and/or are suspected of having ALL. In some embodiments, the plurality of individual control subjects is or includes subjects that have and/or are suspected of having a specific subtype of ALL. In some embodiments, the plurality of individual control subjects is or includes subjects that have and/or are suspected of having ALL, but not a specific subtype of ALL. In particular embodiments, the subtype of ALL is the Philadelphia chromosome positive (Ph+) and/or Philadelphia-like (Ph-like) subtype of ALL. In some embodiments, the plurality of individual control subjects is or includes Ph+ and/or Ph-like subjects.

[0204] In some embodiments, the control value is obtained from a plurality of control samples. In certain embodiments, the plurality of control samples contains at least 2, at least 3, at least 5, at least 10, at least 15, at least 20, at least 25, at least 30, at least 40, at least 50, at least 100, at least 200, at least 300, at least 400, or at least 500 control samples.

[0205] In certain embodiments, an assessment, measurement, determination, or quantification of gene expression, e.g., the amount or level of one or more gene products, can be analyzed by any means in the art. In some embodiments, prior to an analysis, raw gene expression data, e.g., the value of the measured and/or quantified level, amount, or concentration of the gene product can be normalized or transformed, e.g., log-normalized, expressed as an expression ratio, percentile-ranked, and/or quantile-scaled. In some embodiments, gene expression data may further be modified by any nonparametric data scaling approach. In some embodiments, the transformation of the measurement or assessment of the expression of the one or more gene products occurs prior to any normalization to a control. In certain embodiments, the transformation of the measurement or assessment of the expression of the one or more gene products occurs after a normalization to a control value. In some embodiments, the transformation is a logarithmic transformation, a power transformation, or a logit transformation. In some embodiments, the logarithmic transformation is a common log (log₁₀(x)), a natural log (ln(x)), or a binary log (log₂(x)).

[0206] Expression patterns can be evaluated and classified by a variety of means, such as general linear model (GLM), ANOVA, regression (including logistic regression), support vector machines (SVM), linear discriminant analysis (LDA), principal component analysis (PCA), k-nearest neighbor (kNN), neural network (NN), nearest mean/centroid (NM), and Bayesian covariate predictor (BCP). A model, such as SVM, can be developed using any of the subsets and combinations of genes described herein based on the teachings of the invention. In more particular embodiments, an expression pattern is evaluated as the mean of log-normalized expression levels of the genes.

[0207] In some embodiments, a combination of one or more genes that positively correlate and one or more genes that negatively correlate are measured to determine a risk of a toxicity.

[0208] In certain embodiments, an expression profile and/or a gene expression profile is or is indicated by assessing, measuring, determining, and/or quantifying the expression of at least two genes. For example, in some embodiments, assessing or determining the gene expression profile of a sample may include assessing, measuring, determining, and/or quantifying of at least two genes that are associated with and/or correlated to a risk of developing a toxicity, e.g., a neurotoxicity. In certain embodiments, a gene expression profile is obtained by measuring, determining, and/or quantifying the expression of two or more genes, e.g., by measuring, determining, and/or quantifying the gene products of two or more genes, that are positively correlated with risk of developing a toxicity.

[0209] D. Molecular Subtypes of a Disease

[0210] In particular embodiments, provided herein are methods of treating a subject with a subtype, e.g., a molecular subtype, of a disease with a therapy, e.g., a cell therapy or an immunotherapy. In some embodiments, the subtype of the disease is associated with a low, reduced, and/or decreased risk, probability, and/or likelihood of toxicity following administration of and/or associated with the therapy. In certain embodiments, the methods include one or more steps of determining and/or identifying the subtype of the disease of the subject, and for example, by measuring or assessing the expression of one or more genes, e.g., a gene listed in Table 1 or table E2A. In certain embodiments, the methods include one or more steps of administering the therapy to a subject that has been determined to have a subtype of a disease that is associated with a reduced, decreased, or low probability of toxicity following administration of and/or associated with the therapy. In particular embodiments, the methods include one or more steps of administering an alternative therapy or a reduced dose of the therapy to a subject that had been determined not to have a subtype of the disease that is associated with a reduced, decreased, or low probability of toxicity following administration of and/or associated with the therapy.

[0211] In some embodiments, the therapy is administered to treat a disease, e.g., a proliferative disease and/or a cancer. The disease may be associated with and/or contain one or more sub-types of the disease. Particular embodiments contemplate that different disease subtypes may be associated with different risks, probabilities, likelihoods, of toxicity following administration of and/or associated with the therapy. In some embodiments, a subtype of a disease is associated with a least a portion of the symptoms of the disease, but may differ in one or more characteristics of the disease. In some embodiments, the disease is a proliferative disease and/or a cancer, and the sub-type of the proliferative disease or cancer includes or involves diseased cells of the same cell-type. In certain embodiments, the subtype of the proliferative disease or cancer is characterized by a chromosomal abnormality that is not present in other sub-types of the same disease. In some embodiments, the subtype of the cancer or proliferative disease is characterized by a particular positive, high, negative, and/or low expression of one or more genes, e.g., a gene signature. In some embodiments, the subtype of the proliferative disease is identified by measuring, assessing, determining, and/or quantifying the expression of one or more genes listed in Section I-B or in Tables 1, 2, 3, E2A, E2B, or E4. (e.g. a subset of these genes in the relevant Table which has a recited SEQ ID NO, and/or a Uniprot ID).

[0212] In certain embodiments, provided herein are methods of treatment for subjects with a subtype of a proliferative disease and/or a cancer. In certain embodiments, the subtype is a subtype of a B cell malignancy or hematological malignancy. In some embodiments, the subtype is a subtype of a myeloma, e.g., a multiple myeloma (MM), lymphoma or a leukemia, acute lymphoblastic leukemia (ALL), non-Hodgkin's lymphoma (NHL), chronic lymphocytic leukemia (CLL), diffuse large B-cell lymphoma (DLBCL), or acute myeloid leukemia (AML). In some embodiments, the subtype is a subtype of ALL.

[0213] In particular embodiments, provided herein are methods of treating a subject having a subtype of leukemia. In certain embodiments, the methods include one or more steps for treating a subject having a subtype of ALL. In some embodiments, the subtype of ALL is associated with a low, reduced, and/or decreased risk, probability, and/or likelihood of toxicity following administration of and/or associated with the therapy. In certain embodiments, the methods include one or more steps of administering the therapy to a subject that has been determined to have a subtype of ALL that is associated with a reduced, decreased, or low probability of toxicity following administration of and/or associated with the therapy. In particular embodiments, the methods include one or more steps of administering an alternative therapy or a reduced dose of the therapy to a subject that had been determined not to have the subtype of ALL that is associated with a reduced, decreased, or low probability of toxicity following administration of and/or associated with the therapy.

[0214] In particular embodiments, the subtype of ALL is the Philadelphia chromosome positive (Ph+) subtype of ALL. This subtype is characterized, in part, by poor outcomes with treatments of standard chemotherapy. The Philadelphia chromosome is present in 3-4% of pediatric acute lymphoblastic leukemia (PH+ ALL), and about 25% of adult ALL cases. In certain embodiments, the Philadelphia chromosome is contains a translocation, t(9;22)(q34;q1 1), that results in a novel chimeric gene and protein which fuses the BCR gene on chromosome 22 with the gene encoding the Abelson tyrosine kinase (ABL1) on chromosome 9. The resulting BCR-ABL1 fusion transcript and protein is a constitutively activated tyrosine kinase which activates various signaling pathways to promote leukemic transformation in hematopoietic stem cells. In certain embodiments, subjects having the PH+ subtype of ALL have one or more cells that have a Philadelphia chromosome. In certain embodiments, the cells are bone marrow cells. In certain embodiments, the Ph+ subtype of ALL is associated with a low, reduced, and/or decreased risk, probability, and/or likelihood of toxicity following administration of and/or associated with a therapy, e.g., an immunotherapy and/or a cell therapy. In particular embodiments, the provided methods include one or more steps of administering a therapy, e.g., an immunotherapy and/or a cell therapy, to a subject determined to be Ph+.

[0215] In some embodiments, subtype of ALL is identified by assessing and/or analyzing the chromosomal structures for abnormalities, e.g., the Philadelphia chromosome. For example, in some embodiments, the chromosomes are analyzed by karyotyping, e.g., a G-banding technique. G-banding produces an individual's karyotype, whereby giemsa stain is used to produce a series of dark and light bands, with each chromosome displaying a unique banding pattern under light microscope. Each chromosome can be further distinguished by the position of its centromere (metacentric, submetacentric, acrocentric), dividing it into a shorter arm, the p (petite) arm and a longer arm, called the q arm. Chromosomes are then arranged with pairs side by side to detect abnormalities including deletions, duplications, or other structural rearrangements. This technique is relatively inexpensive and is a good first-line test for anomalies, but a limitation of this technique is the inability to detect small deletions or rearrangements.

[0216] Other techniques include fluorescent In-situ Hybridization (FISH) and multicolor FISH which uses a fluorescently-labeled probes to detect the presence or absence of a particular chromosome segment or gene. FISH and multicolor FISH can detect small deletions, duplications and/or subtle chromosomal rearrangements. FISH and multicolor FISH analysis can be performed on the same specimens obtained for chromosome analysis. In some embodiments, the PH+ subtype is identified and/or detected by FISH and/or multicolor FISH.

[0217] In particular embodiments, the subtype of ALL is the Philadelphia-like (Ph-like) subtype of ALL. In some embodiments, the Ph-like subtype is characterized by related gene expression signatures variously referred to as “cluster group R8,” “Philadelphia Chromosome (Ph)-like,” “Ph-like,” “BCR-ABL1-like,” or an “activated tyrosine kinase gene expression signature.” These gene expression signatures have been shown to be highly similar to gene expression profiles measured in PH+ ALL subjects, despite the fact that, in some embodiments, Ph-like subjects to not have the Philadelphia chromosome translocation or the BCR-ABL1 fusion transcript. The prevalence of the Ph-like subtype is approximately 12% in children, 21% in adolescents (16-20 years of age), and 20% to 24% in adults older than 40 years, with a peak (27%) in young adults 21 to 39 years old. It occurs more often in male individuals and patients with Down syndrome. Ph-like ALL is overrepresented in those with Hispanic ethnicity and is associated with inherited genetic variants in GATA3 (rs3824662). It is a clinically and biologically heterogeneous subtype of B-ALL.

[0218] In some embodiments, “Philadelphia chromosome-like” or “BCR-ABL1 -like” gene expression signatures have a deletion of the IKAROS or LKZFI transcription factor that regulates B cell development. In some embodiments, a subject with Ph-like ALL has one or more cells with a rearrangement involving one or more of ABL1, ABL2, CRLF2, CSF1R, EPOR, JAK2, NTRK3, PDGFRB, PTK2B, TSLP, and TYK2. In particular embodiments, a subject with Ph-like ALL has one or more cells with sequence mutations involving FLT3, IL7R, or SH2B3. In certain embodiments, subjects having the Ph-like subtype of ALL have one or more cells with a Ph-like gene expression profile. In certain embodiments, the cells are bone marrow cells. In certain embodiments, the Ph-like subtype of ALL is associated with a low, reduced, and/or decreased risk, probability, and/or likelihood of toxicity following administration of and/or associated with a therapy, e.g., an immunotherapy and/or a cell therapy. In particular embodiments, the provided methods include one or more steps of administering a therapy, e.g., an immunotherapy and/or a cell therapy, to a subject determined have a Ph-like subtype of ALL.

[0219] In some embodiments, the subtype, e.g., the molecular subtype, of ALL is a not a PH+ or Ph-like subtype. In particular embodiments, molecular subtypes of ALL that are not Ph+ or Ph-like subtypes include, but are not limited to, subtypes associated with a TCF3-PBX1 fusion, a ETV6-RUNX1 fusion, a EP300-ZNF384 fusion, a KMT2A-AFF1 fusion, hyperploidy, or a dic(9;20) chromosome abnormality, e.g., dic(9;20)(p13.2;q11.2).

[0220] Particular embodiments include methods of administering an immunotherapy to a subject that has or is suspected of having a Ph-like or PH+ subtype of ALL. In certain embodiments, such methods include one or more steps of selecting and/or identifying a subject having a Ph-like or PH+ subtype of ALL. In certain embodiments, the methods include one or more steps of identifying or detecting a Ph-like or PH+ subtype of ALL in a subject. In particular embodiments, subjects with ALL that lack a Ph-like or PH+ subtype are not administered the immunotherapy. In particular embodiments, the immunotherapy is an immunotherapy that is described in Section-II, such as a T cell engager described in Section II-A or a cell therapy containing CAR expressing cells such as described in Section II-B.

[0221] Methods and techniques of identifying and/or determining a PH+ and/or a Ph-like ALL subtype include, but are not limited to, karyotype analysis, fluorescence in situ hybridization (FISH), multicolor FISH, polymerase chain reaction (PCR), tyrosine kinase inhibitor assays, gene expression profiling, microarrays, e.g., immunoassays, e.g., immunocytochemistry, Western blot analysis, and ELISA. Methods and techniques of identifying and/or determining a PH+ and/or a Ph-like ALL subtypes have been described (see, e.g., Roberts et al., N Engl J Med (2014) 371(11): 1005-1015; Roberts et al. Cancer Cell (2012) 14; 22(2):153-66; Perez-Andreu et al. Nature Genetics (2013) 45(12): 1494-1498; Yap et al. Leuk Lymphoma (2017) 58(4): 950-958; Roberts et al. J Clin Oncol (2017) 35(4): 394-401; Harvey et al. Blood (2013) 122:826; Harvey et al., Blood (2010) 116(23): 4874-4884; and PCT App. No. WO 2013/090419, hereby incorporated by reference in their entirety).

[0222] In certain embodiments, a sample obtained and/or taken from a PH+ and/or Ph-like subject contains positive, high, elevated, and/or increased expression of one or more genes listed in Table 1, Table E2A, and/or Table 3. In certain embodiments, a sample obtained and/or taken from a PH+ and/or Ph-like subject contains negative, low, reduced, and/or decreased expression of one or more genes listed in Table 2 and/or Table E2B. In particular embodiments, a sample obtained and/or taken from a PH+ and/or Ph-like subject contains positive, high, elevated, and/or increased expression of one or more of ADGRF1, BMPR1B, CA6, CCL17, CCR6, CD99, CHN2, CRLF2, DENND3, ENAM, GAS6, GBP5, GLI2, IFITM1, IGJ (JCHAIN), LDB3, LO645744, MDF1C, MUC4, NRXN3, PON2, PTP4A3, S100Z, SEMA6A, SLC37A3, SLC2A5, SPATS2L, TMEM154, TP53INP1, TTYH2, IL2RA, or WNT9A. In some embodiments, a sample obtained and/or taken from a PH+ and/or Ph-like subject contains positive, high, elevated, and/or increased expression of one or more of ADGRF1, BMPR1B, CA6, CD99, CHN2, CRLF2, DENND3, ENAM, GBP5, GLI2, IFITM1, IGJ (JCHAIN), LDB3, L0645744, MDF1C, MUC4, NRXN3, PON2, S100Z, SEMA6A, SLC37A3, SLC2A5, SPATS2L, TMEM154, TP53INP1, TTYH2 or WNT9A. In certain embodiments, a sample obtained and/or taken from a PH+ and/or Ph-like subject contains positive, high, elevated, and/or increased expression of one or more of ADGRF1, CA6, CCL17, CCR6, ENAM, GAS6, GBP5, GLI2, IFITM1, IGJ (JCHAIN), MUC4, PON2, PTP4A3, SEMA6A, SLC37A3, SPATS2L, TMEM154, TP53INP1, IL2RA, or WNT9A. In particular embodiments, a sample obtained and/or taken from a PH+ and/or Ph-like subject contains positive, high, elevated, and/or increased expression of one or more of CCL17, CA6, JCHAIN, PTP4A3, IFITM1, CRLF2, ENAM, GBP5, ABCA9, SV2C, SLC37A3, IL15, IL2RA, and SEMA6A. In some embodiments, the sample is a BMA sample. In certain embodiments, the sample is a plasma sample.

[0223] In particular embodiments, a sample obtained and/or taken from a PH+ and/or Ph-like subject contains negative, low, reduced, and/or decreased expression of one or more of ASAP2, FMNL2, GPR176, MDFI, PCDHGA12, PCDHGA6, PCDHGBS, PCDHGB6, PINLYP, PTCH1, ATP9A, HMX3, DPYSL3, ZNF415, IRX5, TMPRSS15, IL3RA, IGF2BP1, or TTC28. In particular embodiments, a sample obtained and/or taken from a PH+ and/or Ph-like subject contains positive, high, elevated, and/or increased expression of one or more of ADGRF1, BMPR1B, CA6, CCL17, CCR6, CD99, CHN2, CRLF2, DENND3, ENAM, GAS6, GBP5, GLI2, IFITM1, IGJ (JCHAIN), LDB3, LO645744, MDF1C, MUC4, NRXN3, PON2, PTP4A3, S100Z, SEMA6A, SLC37A3, SLC2A5, SPATS2L, TMEM154, TP53INP1, TTYH2, IL2RA, or WNT9A; and also contains negative, low, reduced, and/or decreased expression of one or more of ASAP2, FMNL2, GPR176, MDFI, PCDHGA12, PCDHGA6, PCDHGBS, PCDHGB6, PINLYP, PTCH1, ATP9A, HMX3, DPYSL3, ZNF415, IRX5, TMPRSS15, IL3RA, IGF2BP1, or TTC28. In various embodiments, a sample obtained and/or taken from a PH+ and/or Ph-like subject contains positive, high, elevated, and/or increased expression of one or more of CCL17, CA6, JCHAIN, PTP4A3, IFITM1, CRLF2, ENAM, GBP5, ABCA9, SV2C, SLC37A3, IL15, IL2RA, and SEMA6A; and also contains negative, low, reduced, and/or decreased expression of one or more of PCDHGA12, PCDHGB6, PCDHGBS, PCDHGA9, PINLYP, ASAP2, TTC28, PTCH1, and FMNL1. In particular embodiments, the sample is a BMA sample. In certain embodiments, the sample is a plasma sample.

[0224] Table 3 lists exemplary genes with positive, high, elevated, and/or increased expression in samples taken and/or obtained from PH+ and/or Ph-like subjects.

TABLE 3
Exemplary genes associated with Ph+ and Ph-like subtype of ALL

| Gene Symbol | Full Name | Uniprot No. |
|---|---|---|
| CRLF2 | Cytokine receptor-like factor 2 | Q9HC73 |
| NRXN3 | Neurexin-3-beta | Q9HDB5 |
| BMPR1B | Bone morphogenetic protein receptor | O00238 |
| | type-1B | |
| CHN2 | Beta-chimaerin | P52757 |
| SLC2A5 | Solute carrier family 2, facilitated | P22732 |
| | glucose transporter member 5 | |
| S100Z | Protein S100-Z | Q8WXG8 |
| CD99 | CD99 antigen | P14209 |
| MDFIC | MyoD family inhibitor domain-containing | Q9P1T7 |
| | protein | |
| TTYH2 | Protein tweety homolog 2 | Q9BSA4 |
| DENND3 | DENN domain-containing protein 3 | A2RUS2 |
| LOC645744 | — | — |

[0225] In some embodiments, samples, e.g., BMA samples, that contain high levels of one or more genes that are negatively correlated and/or are negatively associated with toxicity, e.g., a gene listed in Table 1 or Table E2A, have a higher probability of containing a deletion at CDKN2A (9p21), IKZF1 (7p12), KLHL22 (22q11), STARD3NL (7p14), or a BCR-ABL1 or ETV6-RUNX1 fusion than samples that do not contain high levels of one or more the negatively correlated genes. In some embodiments, deletions at CDKN2A (9p21), IKZF1 (7p12), KLHL22 (22q11), STARD3NL (7p14), or a BCR-ABL1 or ETV6-RUNX1 fusion are positively associated with and/or positively correlated to the genes that are negatively correlated and/or are negatively associated with toxicity, e.g., a gene listed in Table 1 or Table E2A. In some embodiments, samples collected from individuals of Hispanic descent have an increased probability of having positive or elevated expression of one or more of the genes that are negatively correlated and/or are negatively associated with toxicity.

[0226] In some embodiments, provided herein are panels, profiles, and/or arrays for use in the detection and/or identification of PH+ and/or Ph-like subtype of ALL. In certain embodiments, the panels, profiles, and/or arrays are suitable for use to measure, assess, detect, and/or quantify the level and/or amount of one or more gene products in a sample, e.g., a BMA sample or a serum sample. In certain embodiments, the gene products are proteins and/or polypeptides. In some embodiments, the gene products are polynucleotides, e.g., mRNA or cDNA derived from mRNA. In particular embodiments, the panels, profiles, and/or arrays include the measurements, assessments, and/or quantifications of at least one, two, three, four, five, six, seven, eight, nine, ten, more than ten, or more than twenty gene products. In some embodiments, the gene products include one or more of the genes listed in Table 1, Table 2, Table 3, Table E2A and/or Table E2B. In particular embodiments, the gene products are of one or more of ADGRF1, BMPR1B, CA6, CCL17, CCR6, CD99, CHN2, CRLF2, DENND3, ENAM, GAS6, GBP5, GLI2, IFITM1, IGJ (JCHAIN), LDB3, L0645744, MDF1C, MUC4, NRXN3, PON2, PTP4A3, S100Z, SEMA6A, SLC37A3, SLC2A5, SPATS2L, TMEM154, TP53INP1, TTYH2, IL2RA, or WNT9A. In certain embodiments, the gene products include one or more of CCL17, CCR6, GAS6, GLI2, PTP4A3, and IL2RA. Gene products may be measured, assessed, detected, and/or quantified by any known means, including but not limited to the techniques described in Section-IC.

[0227] E. Gene Reference Value

[0228] In some embodiments, the comparison of a measurement of one or more gene products to a reference value of the one or more gene products allows for the assessment, measurement, and/or determination of the risk, probability, and/or likelihood of toxicity following administration of and/or associated with a therapy. In some embodiments, the expression of a gene product in a sample is compared to a reference value, e.g., a gene reference value. In some embodiments, the gene reference value is a value of a level, amount, or concentration of the gene product, and/or a transformation thereof. In some embodiments, the gene reference value is or is derived from an amount or level of an RNA gene product or a protein gene product. In particular embodiments, the gene reference value is an amount or level of the gene product, or a transformation thereof, that is a boundary between or a threshold value that separates the amounts or levels of the gene product, or transformations thereof, that indicate a likelihood to develop toxicity and/or an increased, elevated, or high risk of toxicity following administration of a therapy and values or measurements of gene expression that a indicate an absent or low likelihood and/or a decreased, reduced, or low risk of toxicity following administration of a therapy. In some embodiments, the gene reference value is a boundary, divide, and/or threshold value between the amounts or levels of the gene product where a majority of toxicities take place or have previously taken place and amounts or levels of the gene product where a minority of the toxicities take place or previously taken place.

[0229] In certain embodiments, the gene reference value is an amount or level of the gene product, or a transformation thereof, that is a boundary between or a threshold value that separates the amounts or levels of the gene product, or transformations thereof, associated with a disease subtypes from amounts or levels associated with other subtypes of the same disease. In particular embodiments, the gene reference value is an amount or level of the gene product, or a transformation thereof, that is a boundary between or a threshold value that separates the amounts or levels of the gene product, or transformations thereof, associated with PH+ and/or Ph-like subtypes of ALL from the amounts or levels that are associated with subtypes other subtypes of ALL.

[0230] In some embodiments, the reference value is or is derived from the minimal level, amount, or concentration that can be detected, such as by one or more methods described in Section-IC. In certain embodiments, when a comparison indicates that the measurement in a sample of the level, amount, or concentration, of a gene product is below the reference value, then the sample is negative for expression of the gene product. In particular embodiments, when a comparison indicates that the measurement in a sample of the level, amount, or concentration, of a gene product is above the reference value, then the sample is positive for expression of the gene product.

[0231] In some embodiments, the expression of a gene product is compared to a reference value and/or a gene reference value and an elevated, increased and/or high risk of toxicity is indicated. In particular embodiments, the expression of a gene product is compared to a gene reference value and a reduced, decreased and/or low risk of toxicity is indicated. In certain embodiments, the expression of a gene product that has been normalized to a control is compared to a reference value and/or a gene reference value and an elevated, increased and/or high risk of toxicity is indicated. In particular embodiments, the expression of a gene product that has been normalized to a control is compared to a gene reference value and a reduced, decreased and/or low risk of toxicity is indicated. In certain embodiments, a value of the expression of a gene product that have been normalized or transformed is compared to a reference value and/or a gene reference value and an elevated, increased and/or high risk of toxicity is indicated. In particular embodiments, the value of the expression of a gene product that have been normalized or transformed is compared to a gene reference value and a reduced, decreased and/or low risk of toxicity is indicated.

[0232] In some embodiments, the expression of a gene product that is negatively correlated to and/or negatively associated with a risk of toxicity is compared to a gene reference value. In some embodiments, when the expression of a gene product that is negatively correlated to and/or negatively associated with a risk of toxicity is greater than, over, and/or above the gene reference value, then a decreased, reduced, and/or low risk of toxicity is indicated. In some embodiments, when the expression of a gene product that is negatively correlated to and/or negatively associated with a risk of toxicity is less than, under, and/or below the gene reference value, then an elevated, increased, and/or high risk of toxicity is indicated. In certain embodiments, when the expression of a gene product listed in Table 1 or Table E2A is greater than, over, and/or above the gene reference value, then a decreased, reduced, and/or low risk of toxicity is indicated. In particular embodiments, when the expression of a gene product listed in Table 1 or Table E2A is less than, under, and/or below the gene reference value, then an elevated, increased, and/or high risk of toxicity is indicated.

[0233] In particular embodiments, the expression of a gene product that is positively correlated to and/or positively associated with a risk of toxicity is compared to a gene reference value. In some embodiments, when the expression of a gene product that is positively correlated to and/or positively associated with a risk of toxicity is greater than, over, and/or above the gene reference value, than an elevated, increased, and/or high risk of toxicity is indicated. In some embodiments, when the expression of a gene product that is positively correlated to and/or positively associated with a risk of toxicity is less than, under, and/or below the gene reference value, then a decreased, reduced, and/or low risk of toxicity is indicated. In some embodiments, when the expression of a gene product listed in Table 2 or Table E2B is greater than, over, and/or above the gene reference value, than an increased, elevated, and/or high risk of toxicity is indicated. In certain embodiments, when the expression of a gene product listed in Table 2 or Table E2B is less than, under, and/or below the gene reference value, then a decreased, reduced, and/or low risk of toxicity is indicated.

[0234] In some embodiments, the gene reference value is a predetermined value. In particular embodiments, the gene reference value has been calculated and/or derived from data from a study. In some embodiments, the study is a clinical study. In particular embodiments, the clinical study is a completed clinical study. In certain embodiments, the data from the study included gene expression, e.g., expression of a gene product, in samples taken or obtained from subjects in the study. In particular embodiments, the data from the study includes the number of instances and the degree of severity of toxicities experienced by subjects during the study. In certain embodiments, the subjects in the clinical study had or have a disease or condition. In some embodiments, the disease or condition is cancer. In some embodiments, the cancer is ALL.

[0235] In some embodiments, the reference value is or reflects a minimum detectable level, value, or amount of gene expression, e.g., a value that serves as a boundary of positive or negative expression. In certain embodiments, a measurement of the expression of a gene product is compared to a reference value that is or reflects a minimum detectable level, value, or amount of gene expression, e.g., expression of a gene product, and the gene is determined to be positively expressed if the measurement is a value above the reference value, and/or the gene is determined to be negatively expressed if the measurement is a value that is below the reference value.

[0236] In particular embodiments, the expression of a gene product in a sample taken or obtained from a subject is compared to a gene reference value that was calculated and/or derived from a study that included subjects with the same disease or condition as the subject. In certain embodiments, the same disease or condition is a cancer. In particular embodiments the same disease or condition is ALL.

[0237] In some embodiments, the gene reference value is determined by the application of an algorithm to the level, concentration, or amount of expression in a control sample or a plurality of control samples. In some embodiments, the control sample or plurality of control samples is obtained from a subject or group of subjects of a completed study, e.g., a completed clinical trial, where the subjects were monitored for outcome and signs of toxicity, e.g., as described in Section III-A. In particular embodiments, the sample or the plurality of samples were collected prior to the subjects receiving the therapy. In some embodiments, the subject or group of subjects went on to develop signs of toxicity after the therapy was administered. In certain embodiments, the subject or group of subjects developed and/or experienced a grade of 0 or greater, 1 or greater, 2 or greater, 3 or greater, prolonged 3 or greater, 4 or greater, or 5. In some embodiments, the subject or group of subjects developed and/or experienced a grade of 5 or less, 4 or less, prolonged 3 or less, 3 or less, 2 or less, 1 or less, or 0. In certain embodiments, the subject or group of subjects developed and/or experienced a grade of between 3 and 5, between prolonged 3 and 5, between 4 and 5, between 0 and prolonged 3, between 0 and 3, between 0 and 2, or between 0 and 1. In some embodiments, the gene reference value is determined by the application of an algorithm to two or more control samples or pluralities that are obtained from two or more different subjects or different groups of subjects.

[0238] In certain embodiments, illustrative algorithms include but are not limited to methods that reduce the number of variables such as principal component analysis algorithms, partial least squares methods, and independent component analysis algorithms. Illustrative algorithms further include but are not limited to methods that handle large numbers of variables directly such as statistical methods and methods based on machine learning techniques. Statistical methods include penalized logistic regression, prediction analysis of microarrays (PAM), methods based on shrunken centroids, support vector machine analysis, and regularized linear discriminant analysis. Machine learning techniques include bagging procedures, boosting procedures, random forest algorithms, and combinations thereof. In some embodiments of the present invention a support vector machine (SVM) algorithm, a random forest algorithm, or a combination thereof is used for classification of microarray data or RNA-seq data. In some embodiments, identified markers that distinguish samples or subtypes are selected based on statistical significance. In some cases, the statistical significance selection is performed after applying a Benjamini Hochberg correction for false discovery rate (FDR). In certain embodiments, the algorithmic techniques may be applied to the expression profiles of one or more gene products in a sample, such as gene products listed in Table 1, Table 2, Table 3, Table E2A, and/or Table E2B.

[0239] In some embodiments, the algorithm may be supplemented with a meta-analysis approach such as that described by Fishel and Kaufman et al. 2007 Bioinformatics 23(13): 1599-606. Also, the classifier algorithm may be supplemented with a meta-analysis approach such as a repeatability analysis. In some cases, the repeatability analysis selects markers that appear in at least one predictive expression product marker set.

[0240] In some embodiments, the gene reference value is an amount or level of the gene product, or a transformation thereof, that is a boundary between or a threshold value that separates the amounts or levels of the gene product, or transformations thereof, where all or a majority of toxicities take place or have previously taken place, from amounts or levels of the gene product, or transformations thereof, where a minority of the toxicities take place or previously taken place. In particular embodiments, the gene reference value partitions or separates values or measurements of the gene expression associated with more than half, and/or greater than 50%, 60%, 70%, 80%, 90%, 95%, or at or about 100% of the instances of toxicity, e.g., severe neurotoxicity that occurred in a study. In some embodiments, the instance of toxicity is neurotoxicity of grade 2 or greater, grade 3 or greater, grade of prolonged 3 or greater, grade 4 or greater, or grade 5. In some embodiments, the instance of toxicity is neurotoxicity of a grade of between 3 and 5, between prolonged 3 and 5, between 4 and 5, or grade 5 neurotoxicity. In some embodiments, the gene reference value partitions or separates values or measurements of the gene expression that are associated with at least a 25%, at least a 30%, at least a 40%, at least a 45%, at least a 50%, at least a 55%, at least a 60%, at least a 65%, at least a 70%, at least a 75%, at least a 80%, at least a 85%, at least a 90%, at least a 95%, or at or about a 100% frequency of toxicity, such as a neurotoxicity of grade 2 or greater, grade 3 or greater, grade of prolonged 3 or greater, grade 4 or greater, or grade 5; or a neurotoxicity with a grade between 3 and 5, between prolonged 3 and 5, between 4 and 5, or grade 5 neurotoxicity.

[0241] In particular embodiments, the gene reference value is within 25%, within 20%, within 15%, within 10% or within 5% of the gene expression in a control sample. In some embodiments, the gene reference value is within 25%, within 20%, within 15%, within 10% or within 5% an average or median level, concentration or amount of the gene expression in a plurality of control samples. In particular embodiments, the gene reference value is within 2, 1.5, 1.25, 1, 0.75, 0.5, 0.25, or 0.1 standard deviations of an average or median level, concentration or amount of the gene expression in a plurality of control samples, wherein each of the subjects of the group went on to develop severe neurotoxicity, optionally grade 3 or higher, extended grade 3 or higher or grade 4 or 5 neurotoxicity, after receiving the cell therapy for treating the same disease or condition.

[0242] In some embodiments, the reference value is obtained from and/or derived from control samples that were obtained from subjects prior to the administration of the therapy, wherein the subjects of the group went on to develop severe neurotoxicity, such as grade 3 or higher, extended grade 3 or higher, grade 4 or 5, or grade 5 neurotoxicity. In some embodiments, the gene reference value is a value of a gene product of a gene that negatively correlates and/or is negatively associated with toxicity following administration of and/or associated with a therapy, e.g., an immunotherapy or cell therapy, such as a gene product listed in Table 1 and/or E1A (e.g. a subset of these genes in the relevant Table which has a recited SEQ ID NO, and/or a Uniprot ID). In certain embodiments, the gene reference value is within 2-fold, within 1.5 fold, 1.0 fold, within 100%, within 50%, within 40%, within 30%, within 25%, within 20%, within 15%, within 10%, or within 5% above the average level, concentration or amount, and/or is within 2.0, 1.5, 1.25, 1.0, 0.75, 0.5, or 0.25 standard deviations above the average level, concentration, or amount of the gene product in a plurality of the control samples. In certain embodiments, the gene reference value is above the highest level, concentration or amount of the gene product observed in a sample from among the plurality of control samples. In particular embodiments, the gene reference value is within 100%, 75%, 50%, 40%, 30%, 25%, 20%, 10%, or 5% above the highest level, concentration or amount of the gene product observed in a sample from among the plurality of control samples. In some embodiments, the reference value is above the level, concentration or amount observed in at least 50%, at least 60%, at least 70%, at least 75%, at least 80%, at least 85%, at least 90%, or at least 95%, or at least 98% of samples from among a plurality of control samples.

[0243] In some embodiments, the gene reference value is a value of a gene product of a gene that negatively correlates and/or is negatively associated with toxicity following administration of and/or associated with a therapy, and the plurality of control samples are obtained from a group of subjects prior to receiving therapy, wherein each of the subjects of the group did not develop severe neurotoxicity. In some embodiments, the subjects developed grade 3 or less, grade 2 or less, or grade 1 or 0 neurotoxicity, after receiving the therapy. In some embodiments, the value is below the lowest level, concentration, or amount, of the at least one gene product observed in a sample from among a plurality of control samples. In certain embodiments, the reference value is below the lowest level, concentration, or amount of the gene product observed in a sample from among the plurality of control samples that did not experience severe neurotoxicity. In some embodiments, the reference value is within 50%, within 40%, within 30%, within 25%, within 20%, within 15%, within 10%, or within 5% below the lowest level, concentration, or amount of the gene product observed in a sample from among the plurality of control samples that did not experience severe neurotoxicity. In some embodiments, the reference value is below the level, concentration, or amount observed in at least 75%, at least 80%, at least 85%, at least 90%, or at least 95%, or at least 98% of samples from among a plurality of control samples obtained from a group of subjects prior to receiving a cell therapy that did not experience severe toxicity.

[0244] In some embodiments, the reference value is obtained from and/or derived from control samples that were obtained from subjects prior to the administration of the therapy, wherein the each of the subjects of the group has Philadelphia chromosome positive (PH+) or Philadelphia-like (Ph-like) subtype of ALL. In some embodiments, the gene reference value is a value of a gene product of a gene that is positively associated, such as genes that are expressed or highly expressed in samples from Ph-like or PH+subjects, and/or a gene listed in Table 1 and/or E1A (e.g. a subset of these genes in the relevant Table which has a recited SEQ ID NO, and/or a Uniprot ID). In certain embodiments, the gene reference value is within 2-fold, within 1.5 fold, 1.0 fold, within 100%, within 50%, within 40%, within 30%, within 25%, within 20%, within 15%, within 10%, or within 5% above the average level, concentration or amount, and/or is within 2.0, 1.5, 1.25, 1.0, 0.75, 0.5, or 0.25 standard deviations above the average level, concentration, or amount of the gene product in a plurality of the control samples. In certain embodiments, the gene reference value is above the highest level, concentration or amount of the gene product observed in a sample from among the plurality of control samples. In particular embodiments, the gene reference value is within 100%, 75%, 50%, 40%, 30%, 25%, 20%, 10%, or 5% above the highest level, concentration or amount of the gene product observed in a sample from among the plurality of control samples. In some embodiments, the reference value is above the level, concentration or amount observed in at least 50%, at least 60%, at least 70%, at least 75%, at least 80%, at least 85%, at least 90%, or at least 95%, or at least 98% of samples from among a plurality of control samples obtained from a group of subjects prior to receiving a cell therapy that did not experience severe toxicity or that are not associated with Ph-like or PH+ ALL.

[0245] In some embodiments, the gene reference value is a value of a gene product of a gene that is positively associated with PH+ or Ph-like ALL, and the plurality of control samples are obtained from a group of subjects that have ALL, but not the PH+ or Ph-like ALL. In some embodiments, the gene reference value is above the highest level, concentration, or amount, of the at least one gene product observed in a sample from among a plurality of control samples. In certain embodiments, the reference value is below the lowest level, concentration, or amount of the gene product observed in a sample from among the plurality of control samples that did not experience severe neurotoxicity. In some embodiments, the reference value is within 50%, within 40%, within 30%, within 25%, within 20%, within 15%, within 10%, or within 5% below the lowest level, concentration, or amount of the gene product observed in a sample from among the plurality of control samples that did not experience severe neurotoxicity. In some embodiments, the reference value is below the level, concentration, or amount observed in at least 75%, at least 80%, at least 85%, at least 90%, or at least 95%, or at least 98% of samples from among a plurality of control samples obtained from a group of subjects that do not have Ph-like or PH+ ALL.

[0246] In certain embodiments, the reference value is obtained from and/or derived from control samples that were obtained from subjects prior to the administration of the therapy, wherein the subjects of the group went on to develop severe neurotoxicity, such as grade 3 or higher, extended grade 3 or higher, grade 4 or 5, or grade 5 neurotoxicity. In some embodiments, the gene reference value is a value of a gene product of a gene that positively correlates and/or is positively associated with toxicity following administration of and/or associated with a therapy, e.g., an immunotherapy or cell therapy, such as a gene product listed in Table 2 and/or E2B. In certain embodiments, the gene reference value is within 2-fold, within 1.5 fold, 1.0 fold, within 100%, within 50%, within 40%, within 30%, within 25%, within 20%, within 15%, within 10%, or within 5% below the average level, concentration or amount, and/or is within 2.0, 1.5, 1.25, 1.0, 0.75, 0.5, or 0.25 standard deviations below the average level, concentration, or amount of the gene product in a plurality of the control samples. In certain embodiments, the gene reference value is below the lowest level, concentration or amount of the gene product observed in a sample from among the plurality of control samples. In particular embodiments, the gene reference value is within 100%, 75%, 50%, 40%, 30%, 25%, 20%, 10%, or 5% below the lowest level, concentration or amount of the gene product observed in a sample from among the plurality of control samples. In some embodiments, the reference value is below the level, concentration or amount observed in at least 50%, at least 60%, at least 70%, at least 75%, at least 80%, at least 85%, at least 90%, or at least 95%, or at least 98% of samples from among a plurality of control samples.

[0247] In some embodiments, the gene reference value is a value of a gene product of a gene that negatively correlates and/or is negatively associated with toxicity following administration of and/or associated with a therapy, and the plurality of control samples are obtained from a group of subjects prior to receiving a cell therapy containing cells genetically engineered with a recombinant receptor, wherein each of the subjects of the group did not develop severe neurotoxicity. In some embodiments, the subjects developed grade 3 or less, grade 2 or less, or grade 1 or 0 neurotoxicity, after receiving the cell therapy. In some embodiments, the value is below the lowest level, concentration, or amount, of the at least one gene product observed in a sample from among a plurality of control samples. In certain embodiments, the value is within 100%, within 75%, within 50%, within 40%, within 30%, within 25%, within 20%, within 10%, or within 5% below the lowest level, concentration, or amount, of the at least one gene product observed in a sample from among a plurality of control samples. In some embodiments, the reference value is above the level, concentration, or amount observed in at least 75%, at least 80%, at least 85%, at least 90%, or at least 95%, or at least 98% of samples from among a plurality of control samples obtained from a group of subjects prior to receiving a therapy that did not experience severe toxicity.

[0248] In some embodiments, the reference value is obtained from and/or derived from control samples that were obtained from subjects prior to the administration of the therapy, wherein the each of the subjects of the group has Philadelphia chromosome positive (PH+) or Philadelphia-like (Ph-like) subtype of ALL. In some embodiments, the gene reference value is a value of a gene product of a gene that is negatively associated, such as genes that are not expressed or expressed at low levels in samples from Ph-like or PH+subjects, and/or a gene listed in Table 2 and/or E2B. In certain embodiments, the gene reference value is within 2-fold, within 1.5 fold, 1.0 fold, within 100%, within 50%, within 40%, within 30%, within 25%, within 20%, within 15%, within 10%, or within 5% below the average level, concentration, or amount, and/or is within 2.0, 1.5, 1.25, 1.0, 0.75, 0.5, or 0.25 standard deviations above the average level, concentration, or amount of the gene product in a plurality of the control samples. In certain embodiments, the gene reference value is below the lowest level, concentration or amount of the gene product observed in a sample from among the plurality of control samples. In particular embodiments, the gene reference value is within 100%, 75%, 50%, 40%, 30%, 25%, 20%, 10%, or 5% below the lowest level, concentration or amount of the gene product observed in a sample from among the plurality of control samples. In some embodiments, the reference value is below the level, concentration, or amount observed in at least 50%, at least 60%, at least 70%, at least 75%, at least 80%, at least 85%, at least 90%, or at least 95%, or at least 98% of samples from among a plurality of control samples.

[0249] In some embodiments, the expression of at least one, at least two, at least three, at least four, at least five, at least six, at least seven, at least eight, at least nine, at least ten, at least eleven, at least twelve, at least thirteen, at least fourteen, at least fifteen, at least sixteen, at least seventeen, at least eighteen, at least twenty, at least twenty-one, at least twenty-two, at least twenty-three, at least twenty-four, at least twenty-five, at least twenty-six, at least twenty-seven, at least twenty-eight, at least twenty-nine, at least thirty, at least thirty-five, at least forty, at least fifty, at least sixty, at least seventy, at least eighty, at least ninety, or at least one hundred gene products in a sample obtained from a subject are compared to corresponding gene reference values, e.g., gene reference values to the same gene, to determine the probability, risk, or likelihood, that the subject will experience a toxicity, e.g., a severe neurotoxicity. In some embodiments, the subject is at an elevated, increased, and/or high risk of toxicity if comparison of the expression of at least one, at least two, at least three, at least four, at least five, at least six, at least seven, at least eight, at least nine, at least ten, at least eleven, at least twelve, at least thirteen, at least fourteen, at least fifteen, at least sixteen, at least seventeen, at least eighteen, at least twenty, at least twenty-one, at least twenty-two, at least twenty-three, at least twenty-four, at least twenty-five, at least twenty-six, at least twenty-seven, at least twenty-eight, at least twenty-nine, at least thirty, at least thirty-five, at least forty, at least fifty, at least sixty, at least seventy, at least eighty, at least ninety, or at least one hundred gene products with the corresponding gene reference value indicate that the expression is associated with an elevated, increased, and/or high risk of toxicity.

[0250] In some embodiments, the expression of at least one gene product that positively correlates and/or is positively associated with a toxicity and the expression of at least one gene product that negatively correlates to and/or is negatively associated with the toxicity are compared to the corresponding reference values to determine the probability, risk, or likelihood, that the subject will experience a toxicity, e.g., a severe neurotoxicity. In certain embodiments, the expression of at least one gene product listed in Table 1 or Table E2A (e.g. a subset of these genes in the relevant Table which as a recited SEQ ID NO, and/or a Uniprot ID) and the expression of at least one gene product listed in Table 2 or Table E2B (e.g. a subset of these genes in the relevant Table which as a recited SEQ ID NO, and/or a Uniprot ID) are compared to the corresponding reference values to determine the probability, risk, or likelihood, that the subject will experience a toxicity. In some embodiments, the expression of at least one, two, three, four, five, six, seven, eight, nine, ten, eleven, twelve, thirteen, fourteen, fifteen, sixteen, seventeen, eighteen, nineteen, twenty, or more than twenty gene products listed in Table 1 and/or Table E2A (e.g. a subset of these genes in the relevant Table which as a recited SEQ ID NO, and/or a Uniprot ID); and/or the expression of one, two, three, four, five, six, seven, eight, nine, ten, eleven, twelve, thirteen, fourteen, fifteen, sixteen, seventeen, eighteen, nineteen, twenty, or more than twenty gene products listed in Table 2 and/or Table E2B (e.g. a subset of these genes in the relevant Table which as a recited SEQ ID NO, and/or a Uniprot ID) are compared to the corresponding reference values to determine the probability, risk, or likelihood, that the subject will experience a toxicity.

[0251] In particular embodiments, a subject is and/or is considered to have a high, elevated, and/or increased risk of developing a toxicity, e.g., neurotoxicity, to a therapy, e.g., a cell therapy, if the expression of one or more gene products that are negatively correlated to and/or negatively associated with the toxicity, e.g., gene products listed in Table 1 and/or Table E2A (e.g. a subset of these genes in the relevant Table which as a recited SEQ ID NO, and/or a Uniprot ID), are below the reference value. In certain embodiments, a subject is and/or is considered to have a high, elevated, and/or increased risk of developing a toxicity, e.g., neurotoxicity, to a therapy if the expression of expression of at least one, at least two, at least three, at least four, at least five, at least six, at least seven, at least eight, at least nine, at least ten, at least eleven, at least twelve, at least thirteen, at least fourteen, at least fifteen, at least sixteen, at least seventeen, at least eighteen, at least nineteen, at least twenty, at least twenty-five, at least fifty, or at least one hundred gene products that are negatively correlated to and/or negatively associated with the toxicity are below the reference value.

[0252] In some embodiments, a subject is and/or is considered to have a high, elevated, and/or increased risk of developing a toxicity, e.g., neurotoxicity, to a therapy, e.g., a cell therapy, if the expression of one or more gene products that are positively correlated to and/or positively associated with the toxicity, e.g., gene products listed in Table 2 and/or Table E2B (e.g. a subset of these genes in the relevant Table which as a recited SEQ ID NO, and/or a Uniprot ID), are above the reference value. In certain embodiments, a subject is and/or is considered to have a high, elevated, and/or increased risk of developing a toxicity, e.g., neurotoxicity, to a therapy if the expression of expression of at least one, at least two, at least three, at least four, at least five, at least six, at least seven, at least eight, at least nine, at least ten, at least eleven, at least twelve, at least thirteen, at least fourteen, at least fifteen, at least sixteen, at least seventeen, at least eighteen, at least nineteen, at least twenty, at least twenty-five, at least fifty, or at least one hundred gene products that are negatively correlated to and/or negatively associated with the toxicity are above the reference value.

[0253] In particular embodiments, a subject is and/or is considered to have a low, decreased, and/or reduced risk of developing a toxicity, e.g., neurotoxicity, to a therapy, e.g., a cell therapy, if the expression of one or more gene products that are negatively correlated to and/or negatively associated with the toxicity, e.g., gene products listed in Table 1, are above the reference value. In certain embodiments, a subject is and/or is considered to have a low, decreased, and/or reduced risk of developing a toxicity, e.g., neurotoxicity, to a therapy if the expression of expression of at least one, at least two, at least three, at least four, at least five, at least six, at least seven, at least eight, at least nine, at least ten, at least eleven, at least twelve, at least thirteen, at least fourteen, at least fifteen, at least sixteen, at least seventeen, at least eighteen, at least nineteen, at least twenty, at least twenty-five, at least fifty, or at least one hundred gene products that are negatively correlated to and/or negatively associated with the toxicity are above the reference value.

[0254] In some embodiments, the gene product is a protein, e.g., a protein measured from a plasma sample that is obtained from a subject prior to or subsequent to administration of a cell therapy, and the gene referetable e4nce value is a concentration of the protein in serum. In certain embodiments, protein is a gene product that is negatively correlated to and/or negatively associated with toxicity, e.g., a gene product listed in Table 1. In certain embodiments, the plasma sample is obtained from a subject prior to administration of the cell therapy, such as 1 day prior. In certain embodiments, the plasma sample is obtained from a subject subsequent to administration of the cell therapy, such as 2 days, 4 days, or 7 days after administration of the cell therapy.

[0255] In certain embodiments, the plasma sample is obtained from a subject prior to administration of the cell therapy. In certain embodiments, the protein is a protein or portion of a gene product listed in Table 1. In certain embodiments, the gene product is a CCL17, Endoglin, E-selectin, ICAM-3, or IL-GR protein or portion thereof. In some embodiments, the gene reference value is a concentration of the gene product, e.g., the protein or portion thereof, in serum.

[0256] In some embodiments, the plasma sample is collected from the subject prior to administration of the cell therapy, e.g., 1 day prior, and the protein or portion thereof is CCL17. In some embodiments, the gene reference value for CCL17 is a plasma concentration of CCL17 of between or between about 1 pg/mL and 1,000 pg/mL, 5 pg/mL and 250 pg/mL, 20 pg/mL and 100 pg/mL. In some embodiments, the gene reference values are or are about 20 pg/mL, 25 pg/mL, 64 pg/mL, or 100 pg/mL CCL17 in plasma.

[0257] In some embodiments, the plasma sample is collected from the subject prior to administration of the cell therapy, e.g., 1 day prior, and the protein or portion thereof is Endoglin. In some embodiments, the gene reference value for Endoglin is a plasma concentration of Endoglin of between or between about 0.5 pg/mL and 2.5 pg/mL, or 1 pg/mL and 2 pg/mL, each inclusive. In some embodiments, the gene reference values are or are about 1 pg/mL, 1.5 pg/mL, or 2 pg/ml Endoglin in plasma.

[0258] In some embodiments, the plasma sample is collected from the subject prior to administration of the cell therapy, e.g., 1 day prior, and the protein or portion thereof is E-selectin. In some embodiments, the gene reference value for E-selectin is a plasma concentration of E-selectin of between or between about 1 pg/mL and 10 pg/mL, 4 pg/mL and 8 pg/mL, or 6 pg/mL and 8 pg/mL, each inclusive. In some embodiments, the gene reference values are or are about 6 pg/mL or 8 pg/ml E-selectin in plasma.

[0259] In some embodiments, the plasma sample is collected from the subject prior to administration of the cell therapy, e.g., 1 day prior, and the protein or portion thereof is ICAM-3. In some embodiments, the gene reference value for ICAM-3 is a plasma concentration of ICAM 3 of between or between about 0.01 pg/mL and 0.35 pg/mL, 0.1 pg/mL and 0.30 pg/mL, or 0.125 pg/mL and 0.25 pg/mL, each inclusive. In some embodiments, the gene reference values are or are about 0.20 pg/mL, 0.25 pg/mL, or 0.30 pg/ml ICAM-3 in plasma.

[0260] In some embodiments, the plasma sample is collected from the subject prior to administration of the cell therapy, e.g., 1 day prior, and the protein or portion thereof is IL-6R. In some embodiments, the gene reference value for IL-6R is a plasma concentration of IL-6R of between or between about 10 pg/mL and 40 pg/mL, 20 pg/mL and 35 pg/mL, or 30 pg/mL and 35 pg/mL, each inclusive. In some embodiments, the gene reference values are or are about 25 pg/mL, 30 pg/mL, or 35 pg/ml IL-6R in plasma.

[0261] In some embodiments, the plasma sample is collected from the subject subsequent to administration of the cell therapy, e.g., 2 days, 4 days, or 7 days after the cell therapy, and the protein or portion thereof is CCL17. In some embodiments, the gene reference value for CCL17 is a plasma concentration of CCL17 of between or between about 50 pg/mL and 1,000 pg/mL, 100 pg/mL and 600 pg/mL, 150 pg/mL and 500 pg/mL. In some embodiments, the gene reference values are or are about 100 pg/mL, 250 pg/mL, or 500 pg/mL CCL17 in plasma.

[0262] In some embodiments, the plasma sample is collected from the subject subsequent to administration of the cell therapy, e.g., 2 days, 4 days, or 7 days after the cell therapy, and the protein or portion thereof is Endoglin. In some embodiments, the gene reference value for Endoglin is a plasma concentration of Endoglin of between or between about 0.5 pg/mL and 2.5 pg/mL, or 1 pg/mL and 2 pg/mL, each inclusive. In some embodiments, the gene reference values are or are about 1 pg/mL, 1.5 pg/mL, or 2 pg/ml Engoglin in plasma.

[0263] In some embodiments, the plasma sample is collected from the subject subsequent to administration of the cell therapy, e.g., 2 days, 4 days, or 7 days after the cell therapy, and the protein or portion thereof is E-selectin. In some embodiments, the gene reference value for E-selectin is a plasma concentration of E-selectin of between or between about 1 pg/mL and 10 pg/mL, 4 pg/mL and 8 pg/mL, or 6 pg/mL and 8 pg/mL, each inclusive. In some embodiments, the gene reference values are or are about 6 pg/mL or 8 pg/ml E-selectin in plasma.

[0264] In some embodiments, the plasma sample is collected from the subject subsequent to administration of the cell therapy, e.g., 2 days, 4 days, or 7 days after the cell therapy, and the protein or portion thereof is ICAM-3. In some embodiments, the gene reference value for ICAM-3 is a plasma concentration of ICAM 3 of between or between about 0.01 pg/mL and 0.35 pg/mL, 0.1 pg/mL and 0.30 pg/mL, or 0.125 pg/mL and 0.25 pg/mL, each inclusive. In some embodiments, the gene reference values are or are about 0.20 pg/mL, 0.25 pg/mL, or 0.30 pg/ml ICAM-3 in plasma.

[0265] In some embodiments, the plasma sample is collected from the subject subsequent to administration of the cell therapy, e.g., 2 days, 4 days, or 7 days after the cell therapy, and the protein or portion thereof is IL-6R. In some embodiments, the gene reference value for IL-6R is a plasma concentration of IL-6R of between or between about 20 pg/mL and 50 pg/mL, 20 pg/mL and 40 pg/mL, or 25 pg/mL and 35 pg/mL, each inclusive. In some embodiments, the gene reference values are or are about 20 pg/mL, 25 pg/mL, or 30 pg/ml IL-6R in plasma.

[0266] In some embodiments, a subject is and/or is considered to have a low, decreased, and/or reduced risk of developing a toxicity, e.g., neurotoxicity, to a therapy, e.g., a cell therapy, if the expression of one or more gene products that are positively correlated to and/or positively associated with the toxicity, e.g., gene products listed in Table 2, are below the reference value. In certain embodiments, a subject is and/or is considered to have a high, elevated, and/or increased risk of developing a toxicity, e.g., neurotoxicity, to a therapy if the expression of expression of at least one, at least two, at least three, at least four, at least five, at least six, at least seven, at least eight, at least nine, at least ten, at least eleven, at least twelve, at least thirteen, at least fourteen, at least fifteen, at least sixteen, at least seventeen, at least eighteen, at least nineteen, at least twenty, at least twenty-five, at least fifty, or at least one hundred gene products that are negatively correlated to and/or negatively associated with the toxicity are below the reference value.

[0267] In certain embodiments, the subject is and/or is considered to have a high, elevated, and/or increased risk of developing a toxicity, e.g., neurotoxicity, to a therapy, e.g., a cell therapy if the expression of one or more gene products that are negatively correlated to and/or negatively associated with the toxicity, gene products listed in Table 1, are above the reference value and the expression of one or more gene products that is positively correlated to and/or positively associated with the toxicity, e.g., gene products listed in Table 2, are above the reference value. In particular embodiments, the subject is and/or is considered to have a low, reduced and/or decreased risk of developing a toxicity following administration of a therapy, e.g., a cell therapy if the expression of one or more gene products that are negatively correlated to and/or negatively associated with the toxicity, e.g., gene products listed in Table 1, are above the reference value and the expression of one or more gene products that is positively correlated to and/or positively associated with the toxicity, e.g., gene products listed in Table 2, are below the reference value.

### II. IMMUNOTHERAPIES AND CELL THERAPIES

[0268] The methods provided herein include on or more steps of assessing, predicting, and/or determining the risk, likelihood, or probability a subject will experience or develop a toxicity following administration of and/or associated with a therapy. In particular embodiments, the risk, likelihood, and/or probability a subject will experience or develop a toxicity following administration of and/or associated with is determined, assessed, or predicted by one or more methods provided in Section I. In some embodiments, the therapy is an immunotherapy. In particular embodiments, the immunotherapy is or contains an immune system activator or stimulator. In some embodiments, the immunotherapy is a T cell engaging therapy, such as a bispecific T cell engaging therapy. In some embodiments, the therapy is a cell therapy, e.g., an autologous cell therapy. In particular embodiments, the cell therapy includes one or more cells that express a recombinant receptor, such as a T cell receptor (TCR) or a chimeric antigen receptor (CAR). In some embodiments, the immunotherapy, e.g. engineered to contain an engineered receptor, such as a chimeric antigen receptor (CAR), is specific to an antigen associated with ALL, such as CD19, CD22, CD20 or CD123. In some embodiments, the immunotherapy is specific to CD19.

[0269] A. Immunotherapy

[0270] In certain embodiments, the immunotherapy is or contains an immune system activator or stimulator. In certain embodiments, the immune system stimulator is an agent or therapy that activates at least one immune cell. In some embodiments, the immune cell is a T cell. In certain embodiments, the immune cell activator is IL-2, e.g., Proleukin; rhu-IFN-alpha-2a and/or rhu-IFN-alpha-2b, e.g., Pegasys, Roferon-A, Intron-A, and PEG intron; Anti-CD3 monoclonal antibody, e.g., Muromonab-CD3 and/or Orthoclone OKT 3; TGN-1412; and/or Blinatumomab, e.g., anti-CD3xCD19 BiTE.

[0271] In some embodiments, the immunotherapy is or contains a T cell-engaging therapy that is or comprises a binding molecule capable of binding to a surface molecule expressed on a T cell. In some embodiments, the surface molecule is an activating component of a T cell, such as a component of the T cell receptor complex. In some embodiments, the surface molecule is CD3 or is CD2. In some embodiments, the T cell-engaging therapy is or comprises an antibody or antigen-binding fragment. In some embodiments, the T cell-engaging therapy is a bispecific antibody containing at least one antigen-binding domain binding to an activating component of the T cell (e.g. a T cell surface molecule, e.g. CD3 or CD2) and at least one antigen-binding domain binding to a surface antigen on a target cell, such as a surface antigen on a tumor or cancer cell, for example any of the listed antigens as described herein, e.g. CD19. In some embodiments, the simultaneous or near simultaneous binding of such an antibody to both of its targets can result in a temporary interaction between the target cell and T cell, thereby resulting in activation, e.g. cytotoxic activity, of the T cell and subsequent lysis of the target cell.

[0272] Among such exemplary bispecific antibody T cell-engagers are bispecific T cell engager (BiTE) molecules, which contain tandem scFv molecules fused by a flexible linker (see e.g. Nagorsen and Bauerle, Exp Cell Res 317, 1255-1260 (2011); tandem scFv molecules fused to each other via, e.g. a flexible linker, and that further contain an Fc domain composed of a first and a second subunit capable of stable association (WO2013026837); diabodies and derivatives thereof, including tandem diabodies (Holliger et al, Prot Eng 9, 299-305 (1996); Kipriyanov et al, J Mol Biol 293, 41-66 (1999)); dual affinity retargeting (DART) molecules that can include the diabody format with a C-terminal disulfide bridge; or triomabs that include whole hybrid mouse/rat IgG molecules (Seimetz et al, Cancer Treat Rev 36, 458-467 (2010). In some embodiments, the T-cell engaging therapy is blinatumomab or AMG 330. Any of such T cell-engagers can be used in used in the provided methods, compositions or combinations.

[0273] The immune system stimulator and/or the T cell engaging therapy can be administered by any suitable means, for example, by bolus infusion, by injection, e.g., intravenous or subcutaneous injections, intra-ocular injection, peri-ocular injection, sub-retinal injection, intra-vitreal injection, trans-septal injection, sub-scleral injection, intra-choroidal injection, intra-cameral injection, sub-conjunctival injection, sub-conjunctival injection, sub-Tenon's injection, retro-bulbar injection, peri-bulbar injection, or posterior juxta-scleral delivery. In some embodiments, the immunotherapy is administered by parenteral, intrapulmonary, and intranasal, and, if desired for local treatment, intra-lesional administration. Parenteral infusions include intramuscular, intravenous, intraarterial, intraperitoneal, intrathoracic, intracranial, or subcutaneous administration.

[0274] In certain embodiments, if the risk, probability, and/or likelihood that the subject will experience and/or develop a toxicity following administration of or associated with the immunotherapy is determined to be high, increased, and/or elevated by one or more methods provided in Section-I, then the subject is administered the immunotherapy in an in-patient setting and/or with admission to the hospital for one or more days, optionally wherein the immunotherapy is otherwise to be administered to subjects on an outpatient basis or without admission to the hospital for one or more days if the risk, probability, and/or likelihood of is determined to be low, reduced, or decreased according to the results of a method provided in Section-I. In particular embodiments, and immunotherapy, optionally at a non-reduced dose, optionally on an outpatient basis or without admission to the hospital for one or more days, is administered to the subject that is determined to have a low, decreased, and/or reduced risk of toxicity according to the results of a method provided in Section-I.

[0275] In certain embodiments, if the risk, probability, and/or likelihood that the subject will experience and/or develop a toxicity following administration of or associated with the immunotherapy is determined to be high, increased, or elevated by one or more methods provided in Section-I, then the subject is administered a standard dose of the immunotherapy in an in-patient setting and/or with admission to the hospital for one or more days. In particular embodiments, if the risk, probability, and/or likelihood that the subject will experience and/or develop a toxicity following administration of or associated with the immunotherapy is determined to be high, increased, or elevated by one or more methods provided in Section-I, then the subject is administered a reduced dose of the immunotherapy in an in-patient setting and/or with admission to the hospital for one or more days. In certain embodiments, if the risk, probability, and/or likelihood that the subject will experience and/or develop a toxicity following administration of or associated with the immunotherapy is determined to be low, decreased, or reduced by one or more methods provided in Section-I, then the subject is administered a standard dose of the immunotherapy on an outpatient basis or without admission to the hospital for one or more days.

[0276] In certain embodiments, if the risk, probability, and/or likelihood that the subject will experience and/or develop a toxicity following administration of or associated with the immunotherapy is determined to be high, increased, or elevated by one or more of the methods provided in Section-I, then the subject is then the subject is administered a reduced dose of the immunotherapy. In certain embodiments, if the risk, probability, and/or likelihood that the subject will experience and/or develop a toxicity following administration of or associated with the immunotherapy is determined to be low, reduced, or decreased by one or more of the methods provided in Section-I, then the subject is administered a reduced dose of the immunotherapy.

[0277] In some embodiments, a reduced dose of the immunotherapy is less than or equal to 90%, 85%, 80%, 75%, 70%, 65%, 60%, 55%, 50%, 45%, 40%, 35%, 30%, 25%, 20%, 15%, 10%, 5%, 3%, 1%, 0.5%, 0.1%, 0.05%, 0.01%, 0.001%, or 0.0001% of a standard dose of the immunotherapy. In some embodiments, the immunotherapy is a T cell engaging therapy.

[0278] In certain embodiments, if the risk, probability, and/or likelihood that the subject will experience and/or develop a toxicity following administration of or associated with the immunotherapy is determined to be high, increased, or elevated by one or more methods provided in Section-I, then the subject is not administered the immunotherapy. In such embodiments, the subject may be administered an alternative therapy, such as a different immunotherapy or a cell therapy.

[0279] In certain embodiments, one or more doses of a T cell engaging therapy and/or an immune system stimulator are administered. In particular embodiments, a standard dose of between 0.001m to 5,000m of the T cell engaging therapy and/or an immune system stimulator are administered. In particular embodiments, a standard dose of between 0.001μg to 1,000 μg, 0.001 μg to 1 μg, 0.01 μg to 1 μg, 0.1 μg to 10 μg, 0.01 μg to 1 μg, 0.1 μg to 5 μg, 0.1 μg to 50 μg, 1 μg to 100 μg, 10 ∥g to 100 μg, 50 μg to 500 μg, 100 μg to 1,000 μg, 1,000 μg to 2,000 μg, or 2,000 μg to 5,000 μg of the T cell engaging therapy is administered. In some embodiments, the standard dose of the T cell engaging therapy is or includes between 0.01 μg/kg and 100 mg/kg, between 0.1 μg/kg and 10 μg/kg, between 10 μg/kg and 50 μg/kg, between 50 mg/kg and 100 mg/kg, between 0.1 mg/kg and 1 mg/kg, between 1 mg/kg and 10 mg/kg, between 10 mg/kg and 100 mg/kg, between 100 mg/kg and 500 mg/kg, between 200 mg/kg and 300 mg/kg, between 100 mg/kg and 250 mg/kg, between 200 mg/kg and 400 mg/kg, between 250 mg/kg and 500 mg/kg, between 250 mg/kg and 750 mg/kg, between 50 mg/kg and 750 mg/kg, between 1 mg/kg and 10 mg/kg, or between 100 mg/kg and 1,000 mg/kg (amount of the lymphodepleting agent over body weight). In some embodiments, the standard dose of the T cell engaging therapy is at least or at least about or is about 0.1 mg/kg, 0.5 mg/kg, 1 mg/kg, 5 μg/kg, 10 μg/kg, 20 μg/kg, 30 μg/kg, 40 μg/kg, 50 μg/kg, 60 μg/kg, 70 μg/kg, 80 μg/kg, 90 μg/kg, 0.1 mg/kg, 0.5 mg/kg, 1 mg/kg, 2.5 mg/kg, 5 mg/kg, 10 mg/kg, 15 mg/kg, 20 mg/kg, 25 mg/kg, 30 mg/kg, 35 mg/kg, 40 mg/kg, 45 mg/kg, 50 mg/kg, 55 mg/kg, 60 mg/kg, 65 mg/kg, 70 mg/kg, 75 mg/kg, 80 mg/kg, 85 mg/kg, 90 mg/kg, 95 mg/kg, 100 mg/kg, 200 mg/kg, 300 mg/kg, 400 mg/kg, 500 mg/kg, 600 mg/kg, 700 mg/kg, 800 mg/kg, 900 mg/kg, or 1,000 mg/kg. In particular embodiments, the T cell engaging therapy is administered orally, intravenously, intraperitoneally, transdermally, intrathecally, intramuscularly, intranasally, transmucosally, subcutaneously, or rectally.

[0280] B. Engineering Cells for Adoptive Cell Therapy

[0281] In some embodiments, the cells for use in or administered in connection with the provided methods contain or are engineered to contain an engineered receptor, e.g., an engineered antigen receptor, such as a chimeric antigen receptor (CAR), or a T cell receptor (TCR). Also provided are populations of such cells, compositions containing such cells and/or enriched for such cells, such as in which cells of a certain type such as T cells or CD8+ or CD4+ cells are enriched or selected. Among the compositions are pharmaceutical compositions and formulations for administration, such as for adoptive cell therapy. Also provided are therapeutic methods for administering the cells and compositions to subjects, e.g., patients, in accord with the provided methods, and/or with the provided articles of manufacture or compositions.

[0282] In some embodiments, the cells include one or more nucleic acids introduced via genetic engineering, and thereby express recombinant or genetically engineered products of such nucleic acids. In some embodiments, gene transfer is accomplished by first stimulating the cells, such as by combining it with a stimulus that induces a response such as proliferation, survival, and/or activation, e.g., as measured by expression of a cytokine or activation marker, followed by transduction of the activated cells, and expansion in culture to numbers sufficient for clinical applications.

[0283] The cells generally express recombinant receptors, such as antigen receptors including functional non-TCR antigen receptors, e.g., chimeric antigen receptors (CARs), and other antigen-binding receptors such as transgenic T cell receptors (TCRs) or antigen-binding fragments thereof. Also among the receptors are other chimeric receptors.

[0284] 1. Chimeric Antigen Receptors (CARs)

[0285] In some embodiments of the provided methods and uses, chimeric receptors, such as a chimeric antigen receptors, contain one or more domains that combine a ligand-binding domain (e.g. antibody or antibody fragment) that provides specificity for a desired antigen (e.g., tumor antigen) with intracellular signaling domains. In some embodiments, the intracellular signaling domain is an activating intracellular domain portion, such as a T cell activating domain, providing a primary activation signal. In some embodiments, the intracellular signaling domain contains or additionally contains a costimulatory signaling domain to facilitate effector functions. In some embodiments, chimeric receptors when genetically engineered into immune cells can modulate T cell activity, and, in some cases, can modulate T cell differentiation or homeostasis, thereby resulting in genetically engineered cells with improved longevity, survival and/or persistence in vivo, such as for use in adoptive cell therapy methods.

[0286] Exemplary antigen receptors, including CARs, and methods for engineering and introducing such receptors into cells, include those described, for example, in international patent application publication numbers WO200014257, WO2013126726, WO2012/129514, WO2014031687, WO2013/166321, WO2013/071154, WO2013/123061 U.S. patent application publication numbers US2002131960, US2013287748, US20130149337, U.S. Pat. Nos.: 6,451,995, 7,446,190, 8,252,592, 8,339,645, 8,398,282, 7,446,179, 6,410,319, 7,070,995, 7,265,209, 7,354,762, 7,446,191, 8,324,353, and 8,479,118, and European patent application number EP2537416,and/or those described by Sadelain et al., Cancer Discov. 2013 April; 3(4): 388-398; Davila et al. (2013) PLoS ONE 8(4): e61338; Turtle et al., Curr. Opin. Immunol., 2012 October; 24(5): 633-39; Wu et al., Cancer, 2012 March 18(2): 160-75. In some aspects, the antigen receptors include a CAR as described in U.S. Pat. No.: 7,446,190, and those described in International Patent Application Publication No.: WO/2014055668 A1. Examples of the CARs include CARs as disclosed in any of the aforementioned publications, such as WO2014031687, U.S. Pat. No. 8,339,645, U.S. Pat. No. 7,446,179, US 2013/0149337, U.S. Pat. No.: 7,446,190, U.S. Pat. No.: 8,389,282, Kochenderfer et al., 2013, Nature Reviews Clinical Oncology, 10, 267-276 (2013); Wang et al. (2012) J. Immunother. 35(9): 689-701; and Brentjens et al., Sci Transl Med. 2013 5(177). See also Application Nos. WO 2014031687 and US 2013/0149337 and U.S. Pat. Nos. 7,446,190, 8,339,645, 7,446,179, and 8,389,282.

[0287] The chimeric receptors, such as CARs, generally include an extracellular antigen binding domain, such as a portion of an antibody molecule, generally a variable heavy (VH) chain region and/or variable light (VL) chain region of the antibody, e.g., an scFv antibody fragment. In some embodiments, the chimeric antigen receptor includes an extracellular portion containing an antibody or antibody fragment. In some aspects, the chimeric antigen receptor includes an extracellular portion containing the antibody or fragment and an intracellular signaling domain. In some embodiments, the antibody or fragment includes an scFv.

[0288] In some embodiments, the antigen targeted by the receptor is a polypeptide. In some embodiments, it is a carbohydrate or other molecule. In some embodiments, the antigen is selectively expressed or overexpressed on cells of the disease or condition, e.g., the tumor or pathogenic cells, as compared to normal or non-targeted cells or tissues. In other embodiments, the antigen is expressed on normal cells and/or is expressed on the engineered cells.

[0289] Antigens targeted by the receptors in some embodiments include antigens associated with a B cell malignancy, such as any of a number of known B cell marker. In some embodiments, the antigen targeted by the receptor is CD20, CD19, CD22, ROR1, CD45, CD21, CD5, CD33, Igkappa, Iglambda, CD79a, CD79b or CD30.

[0290] In some embodiments, the antigen is a tumor antigen or cancer marker. In some embodiments, the antigen is or includes αvβ6 integrin (avb6 integrin), B cell maturation antigen (BCMA), B7-H3, B7-H6, carbonic anhydrase 9 (CA9, also known as CAIX or G250), a cancer-testis antigen, cancer/testis antigen 1B (CTAG, also known as NY-ESO-1 and LAGE-2), carcinoembryonic antigen (CEA), a cyclin, cyclin A2, C-C Motif Chemokine Ligand 1 (CCL-1), CD19, CD20, CD22, CD23, CD24, CD30, CD33, CD38, CD44, CD44v6, CD44v7/8, CD123, CD133, CD138, CD171, chondroitin sulfate proteoglycan 4 (CSPG4), epidermal growth factor protein (EGFR), type III epidermal growth factor receptor mutation (EGFR vIII), epithelial glycoprotein 2 (EPG-2), epithelial glycoprotein 40 (EPG-40), ephrinB2, ephrine receptor A2 (EPHa2), estrogen receptor, Fc receptor like 5 (FCRL5; also known as Fc receptor homolog 5 or FCRH5), fetal acetylcholine receptor (fetal AchR), a folate binding protein (FBP), folate receptor alpha, ganglioside GD2, 0-acetylated GD2 (OGD2), ganglioside GD3, glycoprotein 100 (gp100), glypican-3 (GPC3), G Protein Coupled Receptor 5D (GPCR5D), Her2/neu (receptor tyrosine kinase erb-B2), Her3 (erb-B3), Her4 (erb-B4), erbB dimers, Human high molecular weight-melanoma-associated antigen (HMW-MAA), hepatitis B surface antigen, Human leukocyte antigen Al (HLA-A1), Human leukocyte antigen A2 (HLA-A2), IL-22 receptor alpha(IL-22Rα), IL-13 receptor alpha 2 (IL-13Rα2), kinase insert domain receptor (kdr), kappa light chain, L1 cell adhesion molecule (L1-CAM), CE7 epitope of L1-CAM, Leucine Rich Repeat Containing 8 Family Member A (LRRC8A), Lewis Y, Melanoma-associated antigen (MAGE)-Al, MAGE-A3, MAGE-A6, MAGE-A10, mesothelin (MSLN), c-Met, murine cytomegalovirus (CMV), mucin 1 (MUC1), MUC16, natural killer group 2 member D (NKG2D) ligands, melan A (MART-1), neural cell adhesion molecule (NCAM), oncofetal antigen, Preferentially expressed antigen of melanoma (PRAME), progesterone receptor, a prostate specific antigen, prostate stem cell antigen (PSCA), prostate specific membrane antigen (PSMA), Receptor Tyrosine Kinase Like Orphan Receptor 1 (ROR1), survivin, Trophoblast glycoprotein (TPBG also known as 5T4), tumor-associated glycoprotein 72 (TAG72), Tyrosinase related protein 1 (TRP1, also known as TYRP1 or gp75), Tyrosinase related protein 2 (TRP2, also known as dopachrome tautomerase, dopachrome delta-isomerase or DCT), vascular endothelial growth factor receptor (VEGFR), vascular endothelial growth factor receptor 2 (VEGFR2), Wilms Tumor 1 (WT-1), a pathogen-specific or pathogen-expressed antigen, or an antigen associated with a universal tag, and/or biotinylated molecules, and/or molecules expressed by HIV, HCV, HBV or other pathogens.

[0291] In some embodiments, the antigen is CD19. In some embodiments, the scFv contains a VH and a VL derived from an antibody or an antibody fragment specific to CD19. In some embodiments, the antibody or antibody fragment that binds CD19 is a mouse derived antibody such as FMC63 and SJ25C1. In some embodiments, the antibody or antibody fragment is a human antibody, e.g., as described in U.S. Patent Publication No. US 2016/0152723.

[0292] In some embodiments, the scFv is derived from FMC63. FMC63 generally refers to a mouse monoclonal IgG1 antibody raised against Nalm-1 and −16 cells expressing CD19 of human origin (Ling, N. R., et al. (1987). Leucocyte typing III. 302). The FMC63 antibody comprises CDRH1 and H2 set forth in SEQ ID NOS: 184, 185 respectively, and CDRH3 set forth in SEQ ID NOS: 186 or 200 and CDRL1 set forth in SEQ ID NOS: 181 and CDR L2 set forth in SEQ ID NOS:182 or 201 and CDR L3 sequences set forth in SEQ ID NOS:183 or 180. The FMC63 antibody comprises the heavy chain variable region (V_{H}) comprising the amino acid sequence of SEQ ID NO: 187 and the light chain variable region (V_{L}) comprising the amino acid sequence of SEQ ID NO: 188. In some embodiments, the svFv comprises a variable light chain containing the CDRL1 sequence of SEQ ID NO 181, a CDRL2 sequence of SEQ ID NO:182, and a CDRL3 sequence of SEQ ID NO:183 and/or a variable heavy chain containing a CDRH1 sequence of SEQ ID NO:184, a CDRH2 sequence of SEQ ID NO:185, and a CDRH3 sequence of SEQ ID NO:186. In some embodiments, the scFv comprises a variable heavy chain region of FMC63 set forth in SEQ ID NO:187 and a variable light chain region of FMC63 set forth in SEQ ID NO:188. In some embodiments, the variable heavy and variable light chains are connected by a linker. In some embodiments, the linker is set forth in SEQ ID NO:202. In some embodiments, the scFv comprises, in order, a V_{H}, a linker, and a V_{L}. In some embodiments, the scFv comprises, in order, a V_{L}, a linker, and a V_{H}. In some embodiments, the svFc is encoded by a sequence of nucleotides set forth in SEQ ID NO:203 or a sequence that exhibits at least 85%, 86%, 87%, 88%, 89%, 90%, 91%, 92%, 93%, 94%, 95%, 96%, 97%, 98%, or 99% sequence identity to SEQ ID NO:203. In some embodiments, the scFv comprises the sequence of amino acids set forth in SEQ ID NO:189 or a sequence that exhibits at least 85%, 86%, 87%, 88%, 89%, 90%, 91%, 92%, 93%, 94%, 95%, 96%, 97%, 98%, or 99% sequence identity to SEQ ID NO:189.

[0293] In some embodiments the scFv is derived from SJ25C1. SJ25C1 is a mouse monoclonal IgG1 antibody raised against Nalm-1 and −16 cells expressing CD19 of human origin (Ling, N. R., et al. (1987). Leucocyte typing III. 302). The SJ25C1 antibody comprises CDRH1, H2 and H3 set forth in SEQ ID NOS: 193-195, respectively, and CDRL1, L2 and L3 sequences set forth in SEQ ID NOS: 190-192, respectively. The SJ25C1 antibody comprises the heavy chain variable region (V_{H}) comprising the amino acid sequence of SEQ ID NO: 196 and the light chain variable region (V_{L}) comprising the amino acid sequence of SEQ ID NO: 197. In some embodiments, the svFv comprises a variable light chain containing the CDRL1 sequence of SEQ ID NO:190, a CDRL2 sequence of SEQ ID NO: 191, and a CDRL3 sequence of SEQ ID NO:192 and/or a variable heavy chain containing a CDRH1 sequence of SEQ ID NO:193, a CDRH2 sequence of SEQ ID NO: 194, and a CDRH3 sequence of SEQ ID NO:195. In some embodiments, the scFv comprises a variable heavy chain region of SJ25C1 set forth in SEQ ID NO:196 and a variable light chain region of SJ25C1 set forth in SEQ ID NO:197. In some embodiments, the variable heavy and variable light chain are connected by a linker. In some embodiments, the linker is set forth in SEQ ID NO:198. In some embodiments, the scFv comprises, in order, a V_{H}, a linker, and a V_{L}. In some embodiments, the scFv comprises, in order, a V_{L}, a linker, and a V_{H}. In some embodiments, the scFv comprises the sequence of amino acids set forth in SEQ ID NO:199 or a sequence that exhibits at least 85%, 86%, 87%, 88%, 89%, 90%, 91%, 92%, 93%, 94%, 95%, 96%, 97%, 98%, or 99% sequence identity to SEQ ID NO:199.

[0294] In some embodiments, the antigen is CD20. In some embodiments, the scFv contains a VH and a VL derived from an antibody or an antibody fragment specific to CD20. In some embodiments, the antibody or antibody fragment that binds CD20 is an antibody that is or is derived from Rituximab, such as is Rituximab scFv.

[0295] In some embodiments, the antigen is CD22. In some embodiments, the scFv contains a VH and a VL derived from an antibody or an antibody fragment specific to CD22. In some embodiments, the antibody or antibody fragment that binds CD22 is an antibody that is or is derived from m971, such as is m971 scFv.

[0296] In some embodiments, the antibody portion of the recombinant receptor, e.g., CAR, further includes at least a portion of an immunoglobulin constant region, such as a hinge region, e.g., an IgG4 hinge region, and/or a CH1/CL and/or Fc region. In some embodiments, the constant region or portion is of a human IgG, such as IgG4 or IgG1. In some aspects, the portion of the constant region serves as a spacer region between the antigen-recognition component, e.g., scFv, and transmembrane domain. The spacer can be of a length that provides for increased responsiveness of the cell following antigen binding, as compared to in the absence of the spacer. Exemplary spacers include, but are not limited to, those described in Hudecek et al. (2013) Clin. Cancer Res., 19:3153, international patent application publication number WO2014031687, U.S. Pat. No. 8,822,647 or published app. No. US2014/0271635.

[0297] In some embodiments, the constant region or portion is of a human IgG, such as IgG4 or IgG1. In some embodiments, the spacer has the sequence ESKYGPPCPPCP (set forth in SEQ ID NO: 147), and is encoded by the sequence set forth in SEQ ID NO: 148. In some embodiments, the spacer has the sequence set forth in SEQ ID NO: 149. In some embodiments, the spacer has the sequence set forth in SEQ ID NO: 150. In some embodiments, the constant region or portion is of IgD. In some embodiments, the spacer has the sequence set forth in SEQ ID NO: 151. In some embodiments, the spacer has a sequence of amino acids that exhibits at least 85%, 86%, 87%, 88%, 89%, 90%, 91%, 92%, 93%, 94%, 95%, 96%, 97%, 98%, 99% or more sequence identity to any of SEQ ID NOS: 147, 149, 150 or 151. In some embodiments, the spacer has the sequence set forth in SEQ ID NOS: 168-179. In some embodiments, the spacer has a sequence of amino acids that exhibits at least 85%, 86%, 87%, 88%, 89%, 90%, 91%, 92%, 93%, 94%, 95%, 96%, 97%, 98%, 99% or more sequence identity to any of SEQ ID NOS: 168-179.

[0298] In some embodiments, the antigen receptor comprises an intracellular domain linked directly or indirectly to the extracellular domain. In some embodiments, the chimeric antigen receptor includes a transmembrane domain linking the extracellular domain and the intracellular signaling domain. In some embodiments, the intracellular signaling domain comprises an ITAM. For example, in some aspects, the antigen recognition domain (e.g. extracellular domain) generally is linked to one or more intracellular signaling components, such as signaling components that mimic activation through an antigen receptor complex, such as a TCR complex, in the case of a CAR, and/or signal via another cell surface receptor. In some embodiments, the chimeric receptor comprises a transmembrane domain linked or fused between the extracellular domain (e.g. scFv) and intracellular signaling domain. Thus, in some embodiments, the antigen-binding component (e.g., antibody) is linked to one or more transmembrane and intracellular signaling domains.

[0299] In one embodiment, a transmembrane domain that naturally is associated with one of the domains in the receptor, e.g., CAR, is used. In some instances, the transmembrane domain is selected or modified by amino acid substitution to avoid binding of such domains to the transmembrane domains of the same or different surface membrane proteins to minimize interactions with other members of the receptor complex.

[0300] The transmembrane domain in some embodiments is derived either from a natural or from a synthetic source. Where the source is natural, the domain in some aspects is derived from any membrane-bound or transmembrane protein. Transmembrane regions include those derived from (i.e. comprise at least the transmembrane region(s) of) the alpha, beta or zeta chain of the T-cell receptor, CD28, CD3 epsilon, CD45, CD4, CD5, CD8, CD9, CD16, CD22, CD33, CD37, CD64, CD80, CD86, CD134, CD137, CD154. Alternatively the transmembrane domain in some embodiments is synthetic. In some aspects, the synthetic transmembrane domain comprises predominantly hydrophobic residues such as leucine and valine. In some aspects, a triplet of phenylalanine, tryptophan and valine will be found at each end of a synthetic transmembrane domain. In some embodiments, the linkage is by linkers, spacers, and/or transmembrane domain(s). In some aspects, the transmembrane domain contains a transmembrane portion of CD28.

[0301] In some embodiments, the extracellular domain and transmembrane domain can be linked directly or indirectly. In some embodiments, the extracellular domain and transmembrane are linked by a spacer, such as any described herein. In some embodiments, the receptor contains extracellular portion of the molecule from which the transmembrane domain is derived, such as a CD28 extracellular portion.

[0302] Among the intracellular signaling domains are those that mimic or approximate a signal through a natural antigen receptor, a signal through such a receptor in combination with a costimulatory receptor, and/or a signal through a costimulatory receptor alone. In some embodiments, a short oligo- or polypeptide linker, for example, a linker of between 2 and 10 amino acids in length, such as one containing glycines and serines, e.g., glycine-serine doublet, is present and forms a linkage between the transmembrane domain and the cytoplasmic signaling domain of the CAR.

[0303] T cell activation is in some aspects described as being mediated by two classes of cytoplasmic signaling sequences: those that initiate antigen-dependent primary activation through the TCR (primary cytoplasmic signaling sequences), and those that act in an antigen-independent manner to provide a secondary or co-stimulatory signal (secondary cytoplasmic signaling sequences). In some aspects, the CAR includes one or both of such signaling components.

[0304] The receptor, e.g., the CAR, generally includes at least one intracellular signaling component or components. In some aspects, the CAR includes a primary cytoplasmic signaling sequence that regulates primary activation of the TCR complex. Primary cytoplasmic signaling sequences that act in a stimulatory manner may contain signaling motifs which are known as immunoreceptor tyrosine-based activation motifs or ITAMs. Examples of ITAM containing primary cytoplasmic signaling sequences include those derived from CD3 zeta chain, FcR gamma, CD3 gamma, CD3 delta and CD3 epsilon. In some embodiments, cytoplasmic signaling molecule(s) in the CAR contain(s) a cytoplasmic signaling domain, portion thereof, or sequence derived from CD3 zeta.

[0305] In some embodiments, the receptor includes an intracellular component of a TCR complex, such as a TCR CD3 chain that mediates T-cell activation and cytotoxicity, e.g., CD3 zeta chain. Thus, in some aspects, the antigen-binding portion is linked to one or more cell signaling modules. In some embodiments, cell signaling modules include CD3 transmembrane domain, CD3 intracellular signaling domains, and/or other CD transmembrane domains. In some embodiments, the receptor, e.g., CAR, further includes a portion of one or more additional molecules such as Fc receptor γ, CD8, CD4, CD25, or CD16. For example, in some aspects, the CAR or other chimeric receptor includes a chimeric molecule between CD3-zeta (CD3-ζ or Fc receptor γ and CD8, CD4, CD25 or CD16.

[0306] In some embodiments, upon ligation of the CAR or other chimeric receptor, the cytoplasmic domain or intracellular signaling domain of the receptor activates at least one of the normal effector functions or responses of the immune cell, e.g., T cell engineered to express the CAR. For example, in some contexts, the CAR induces a function of a T cell such as cytolytic activity or T-helper activity, such as secretion of cytokines or other factors. In some embodiments, a truncated portion of an intracellular signaling domain of an antigen receptor component or costimulatory molecule is used in place of an intact immunostimulatory chain, for example, if it transduces the effector function signal. In some embodiments, the intracellular signaling domain or domains include the cytoplasmic sequences of the T cell receptor (TCR), and in some aspects also those of co-receptors that in the natural context act in concert with such receptors to initiate signal transduction following antigen receptor engagement.

[0307] In the context of a natural TCR, full activation generally requires not only signaling through the TCR, but also a costimulatory signal. Thus, in some embodiments, to promote full activation, a component for generating secondary or co-stimulatory signal is also included in the CAR. In other embodiments, the CAR does not include a component for generating a costimulatory signal. In some aspects, an additional CAR is expressed in the same cell and provides the component for generating the secondary or costimulatory signal.

[0308] In some embodiments, the chimeric antigen receptor contains an intracellular domain of a T cell costimulatory molecule. In some embodiments, the CAR includes a signaling domain and/or transmembrane portion of a costimulatory receptor, such as CD28, 4-1BB, OX40, DAP10, and ICOS. In some aspects, the same CAR includes both the activating and costimulatory components. In some embodiments, the chimeric antigen receptor contains an intracellular domain derived from a T cell costimulatory molecule or a functional variant thereof, such as between the transmembrane domain and intracellular signaling domain. In some aspects, the T cell costimulatory molecule is CD28 or 41BB.

[0309] In some embodiments, the activating domain is included within one CAR, whereas the costimulatory component is provided by another CAR recognizing another antigen. In some embodiments, the CARs include activating or stimulatory CARs, costimulatory CARs, both expressed on the same cell (see WO2014/055668). In some aspects, the cells include one or more stimulatory or activating CAR and/or a costimulatory CAR. In some embodiments, the cells further include inhibitory CARs (iCARs, see Fedorov et al., Sci. Transl. Medicine, 5(215) (December, 2013), such as a CAR recognizing an antigen other than the one associated with and/or specific for the disease or condition whereby an activating signal delivered through the disease-targeting CAR is diminished or inhibited by binding of the inhibitory CAR to its ligand, e.g., to reduce off-target effects

[0310] In certain embodiments, the intracellular signaling domain comprises a CD28 transmembrane and signaling domain linked to a CD3 (e.g., CD3-zeta) intracellular domain. In some embodiments, the intracellular signaling domain comprises a chimeric CD28 and CD137 (4-1BB, TNFRSF9) co-stimulatory domains, linked to a CD3 zeta intracellular domain.

[0311] In some embodiments, the CAR encompasses one or more, e.g., two or more, costimulatory domains and an activation domain, e.g., primary activation domain, in the cytoplasmic portion. Exemplary CARs include intracellular components of CD3-zeta, CD28, and 4-1BB.

[0312] In some embodiments, the antigen receptor further includes a marker and/or cells expressing the CAR or other antigen receptor further includes a surrogate marker, such as a cell surface marker, which may be used to confirm transduction or engineering of the cell to express the receptor. In some aspects, the marker includes all or part (e.g., truncated form) of CD34, a NGFR, or epidermal growth factor receptor, such as truncated version of such a cell surface receptor (e.g., tEGFR). In some embodiments, the nucleic acid encoding the marker is operably linked to a polynucleotide encoding for a linker sequence, such as a cleavable linker sequence, e.g., T2A. For example, a marker, and optionally a linker sequence, can be any as disclosed in published patent application No. WO2014031687. For example, the marker can be a truncated EGFR (tEGFR) that is, optionally, linked to a linker sequence, such as a T2A cleavable linker sequence.

[0313] An exemplary polypeptide for a truncated EGFR (e.g. tEGFR) comprises the sequence of amino acids set forth in SEQ ID NO: 153 or 162 or a sequence of amino acids that exhibits at least 85%, 86%, 87%, 88%, 89%, 90%, 91%, 92%, 93%, 94%, 95%, 96%, 97%, 98%, 99% or more sequence identity to SEQ ID NO: 153 or 162. An exemplary T2A linker sequence comprises the sequence of amino acids set forth in SEQ ID NO: 153 or 162 or a sequence of amino acids that exhibits at least 85%, 86%, 87%, 88%, 89%, 90%, 91%, 92%, 93%, 94%, 95%, 96%, 97%, 98%, 99% or more sequence identity to SEQ ID NO: 153 or 162.

[0314] In some embodiments, the marker is a molecule, e.g., cell surface protein, not naturally found on T cells or not naturally found on the surface of T cells, or a portion thereof. In some embodiments, the molecule is a non-self molecule, e.g., non-self protein, i.e., one that is not recognized as “self” by the immune system of the host into which the cells will be adoptively transferred.

[0315] In some embodiments, the marker serves no therapeutic function and/or produces no effect other than to be used as a marker for genetic engineering, e.g., for selecting cells successfully engineered. In other embodiments, the marker may be a therapeutic molecule or molecule otherwise exerting some desired effect, such as a ligand for a cell to be encountered in vivo, such as a costimulatory or immune checkpoint molecule to enhance and/or dampen responses of the cells upon adoptive transfer and encounter with ligand.

[0316] In some cases, CARs are referred to as first, second, and/or third generation CARs. In some aspects, a first generation CAR is one that solely provides a CD3-chain induced signal upon antigen binding; in some aspects, a second-generation CARs is one that provides such a signal and costimulatory signal, such as one including an intracellular signaling domain from a costimulatory receptor such as CD28 or CD137; in some aspects, a third generation CAR is one that includes multiple costimulatory domains of different costimulatory receptors.

[0317] For example, in some embodiments, the CAR contains an antibody, e.g., an antibody fragment, a transmembrane domain that is or contains a transmembrane portion of CD28 or a functional variant thereof, and an intracellular signaling domain containing a signaling portion of CD28 or functional variant thereof and a signaling portion of CD3 zeta or functional variant thereof. In some embodiments, the CAR contains an antibody, e.g., antibody fragment, a transmembrane domain that is or contains a transmembrane portion of CD28 or a functional variant thereof, and an intracellular signaling domain containing a signaling portion of a 4-1BB or functional variant thereof and a signaling portion of CD3 zeta or functional variant thereof. In some such embodiments, the receptor further includes a spacer containing a portion of an Ig molecule, such as a human Ig molecule, such as an Ig hinge, e.g. an IgG4 hinge, such as a hinge-only spacer.

[0318] In some embodiments, the transmembrane domain of the recombinant receptor, e.g., the CAR, is or includes a transmembrane domain of human CD28 (e.g. Accession No. P01747.1) or variant thereof, such as a transmembrane domain that comprises the sequence of amino acids set forth in SEQ ID NO: 154 or a sequence of amino acids that exhibits at least 85%, 86%, 87%, 88%, 89%, 90%, 91%, 92%, 93%, 94%, 95%, 96%, 97%, 98%, 99% or more sequence identity to SEQ ID NO: 154; in some embodiments, the transmembrane-domain containing portion of the recombinant receptor comprises the sequence of amino acids set forth in SEQ ID NO: 155 or a sequence of amino acids having at least at or about 85%, 86%, 87%, 88%, 89%, 90%, 91%, 92%, 93%, 94%, 95%, 96%, 97%, 98%, 99% or more sequence identity thereto.

[0319] In some embodiments, the intracellular signaling component(s) of the recombinant receptor, e.g. the CAR, contains an intracellular costimulatory signaling domain of human CD28 or a functional variant or portion thereof, such as a domain with an LL to GG substitution at positions 186-187 of a native CD28 protein. For example, the intracellular signaling domain can comprise the sequence of amino acids set forth in SEQ ID NO: 156 or 157 or a sequence of amino acids that exhibits at least 85%, 86%, 87%, 88%, 89%, 90%, 91%, 92%, 93%, 94%, 95%, 96%, 97%, 98%, 99% or more sequence identity to SEQ ID NO: 156 or 157. In some embodiments, the intracellular domain comprises an intracellular costimulatory signaling domain of 4-1BB (e.g. (Accession No. Q07011.1) or functional variant or portion thereof, such as the sequence of amino acids set forth in SEQ ID NO: 158 or a sequence of amino acids that exhibits at least 85%, 86%, 87%, 88%, 89%, 90%, 91%, 92%, 93%, 94%, 95%, 96%, 97%, 98%, 99% or more sequence identity to SEQ ID NO: 158.

[0320] In some embodiments, the intracellular signaling domain of the recombinant receptor, e.g. the CAR, comprises a human CD3 zeta stimulatory signaling domain or functional variant thereof, such as an 112 AA cytoplasmic domain of isoform 3 of human CD3 (Accession No.: P20963.2) or a CD3 zeta signaling domain as described in U.S. Pat. No.: 7,446,190 or U.S. Pat. No. 8,911,993. For example, in some embodiments, the intracellular signaling domain comprises the sequence of amino acids as set forth in SEQ ID NO: 159, 160, 161 or a sequence of amino acids that exhibits at least 85%, 86%, 87%, 88%, 89%, 90%, 91%, 92%, 93%, 94%, 95%, 96%, 97%, 98%, 99% or more sequence identity to SEQ ID NO: 159, 160, 161.

[0321] In some aspects, the spacer contains only a hinge region of an IgG, such as only a hinge of IgG4 or IgG1, such as the hinge only spacer set forth in SEQ ID NO: 147. In other embodiments, the spacer is or contains an Ig hinge, e.g., an IgG4-derived hinge, optionally linked to a CH2 and/or CH3 domains. In some embodiments, the spacer is an Ig hinge, e.g., an IgG4 hinge, linked to CH2 and CH3 domains, such as set forth in SEQ ID NO: 150. In some embodiments, the spacer is an Ig hinge, e.g., an IgG4 hinge, linked to a CH3 domain only, such as set forth in SEQ ID NO: 149. In some embodiments, the spacer is or comprises a glycine-serine rich sequence or other flexible linker such as known flexible linkers.

[0322] For example, in some embodiments, the CAR includes an antibody such as an antibody fragment, including scFvs, a spacer, such as a spacer containing a portion of an immunoglobulin molecule, such as a hinge region and/or one or more constant regions of a heavy chain molecule, such as an Ig-hinge containing spacer, a transmembrane domain containing all or a portion of a CD28-derived transmembrane domain, a CD28-derived intracellular signaling domain, and a CD3 zeta signaling domain. In some embodiments, the CAR includes an antibody or fragment, such as scFv, a spacer such as any of the Ig-hinge containing spacers, a CD28-derived transmembrane domain, a 4-1BB-derived intracellular signaling domain, and a CD3 zeta-derived signaling domain.

[0323] In some embodiments, nucleic acid molecules encoding such CAR constructs further includes a sequence encoding a T2A ribosomal skip element and/or a tEGFR sequence, e.g., downstream of the sequence encoding the CAR. In some embodiments, the sequence encodes a T2A ribosomal skip element set forth in SEQ ID NO: 152 or 163, or a sequence of amino acids that exhibits at least 85%, 86%, 87%, 88%, 89%, 90%, 91%, 92%, 93%, 94%, 95%, 96%, 97%, 98%, 99% or more sequence identity to SEQ ID NO: 152 or 163. In some embodiments, T cells expressing an antigen receptor (e.g. CAR) can also be generated to express a truncated EGFR (EGFRt) as a non-immunogenic selection epitope (e.g. by introduction of a construct encoding the CAR and EGFRt separated by a T2A ribosome switch to express two proteins from the same construct), which then can be used as a marker to detect such cells (see e.g. U.S. Pat. No. 8,802,374). In some embodiments, the sequence encodes an tEGFR sequence set forth in SEQ ID NO: 7 or 16, or a sequence of amino acids that exhibits at least 85%, 86%, 87%, 88%, 89%, 90%, 91%, 92%, 93%, 94%, 95%, 96%, 97%, 98%, 99% or more sequence identity to SEQ ID NO: 152 or 163. In some cases, the peptide, such as T2A, can cause the ribosome to skip (ribosome skipping) synthesis of a peptide bond at the C-terminus of a 2A element, leading to separation between the end of the 2A sequence and the next peptide downstream (see, for example, de Felipe. Genetic Vaccines and Ther. 2:13 (2004) and deFelipe et al. Traffic 5:616-626 (2004)). Many 2A elements are known. Examples of 2A sequences that can be used in the methods and nucleic acids disclosed herein, without limitation, 2A sequences from the foot-and-mouth disease virus (F2A, e.g., SEQ ID NO: 167), equine rhinitis A virus (E2A, e.g., SEQ ID NO: 166), Thosea asigna virus (T2A, e.g., SEQ ID NO: 152 or 163), and porcine teschovirus-1 (P2A, e.g., SEQ ID NO: 164 or 165) as described in U.S. Patent Publication No. 20070116690.

[0324] The recombinant receptors, such as CARs, expressed by the cells administered to the subject generally recognize or specifically bind to a molecule that is expressed in, associated with, and/or specific for the disease or condition or cells thereof being treated. Upon specific binding to the molecule, e.g., antigen, the receptor generally delivers an immunostimulatory signal, such as an ITAM-transduced signal, into the cell, thereby promoting an immune response targeted to the disease or condition. For example, in some embodiments, the cells express a CAR that specifically binds to an antigen expressed by a cell or tissue of the disease or condition or associated with the disease or condition.

[0325] 2. Multi-Targeting

[0326] In some embodiments, the cells used in connection with the provided methods, uses, articles of manufacture and compositions include cells employing multi-targeting strategies. In some embodiments, the cells express multi-chain chimeric antigen receptors (CAR) or express two or more genetically engineered receptors on the cell, each recognizing the same of a different antigen and typically each including a different intracellular signaling component. Such multi-targeting strategies are described, for example, in International Patent Application, Publication No.: WO 2014055668 A1 (describing combinations of activating and costimulatory CARs, e.g., targeting two different antigens present individually on off-target, e.g., normal cells, but present together only on cells of the disease or condition to be treated) and Fedorov et al., Sci. Transl. Medicine, 5(215) (2013) (describing cells expressing an activating and an inhibitory CAR, such as those in which the activating CAR binds to one antigen expressed on both normal or non-diseased cells and cells of the disease or condition to be treated, and the inhibitory CAR binds to another antigen expressed only on the normal cells or cells which it is not desired to treat).

[0327] For example, in some embodiments, the cells include a receptor expressing a first genetically engineered antigen receptor (e.g., CAR or TCR) which is capable of inducing an activating or stimulatory signal to the cell, generally upon specific binding to the antigen recognized by the first receptor, e.g., the first antigen. In some embodiments, the cell further includes a second genetically engineered antigen receptor (e.g., CAR or TCR), e.g., a chimeric costimulatory receptor, which is capable of inducing a costimulatory signal to the immune cell, generally upon specific binding to a second antigen recognized by the second receptor. In some embodiments, the first antigen and second antigen are the same. In some embodiments, the first antigen and second antigen are different.

[0328] In some embodiments, the first and/or second genetically engineered antigen receptor (e.g. CAR or TCR) is capable of inducing an activating signal to the cell. In some embodiments, the receptor includes an intracellular signaling component containing ITAM or ITAM-like motifs. In some embodiments, the activation induced by the first receptor involves a signal transduction or change in protein expression in the cell resulting in initiation of an immune response, such as ITAM phosphorylation and/or initiation of ITAM-mediated signal transduction cascade, formation of an immunological synapse and/or clustering of molecules near the bound receptor (e.g. CD4 or CD8, etc.), activation of one or more transcription factors, such as NF-κB and/or AP-1, and/or induction of gene expression of factors such as cytokines, proliferation, and/or survival.

[0329] In some embodiments, the first and/or second receptor includes intracellular signaling domains or regions of costimulatory receptors such as CD28, CD137 (4-1BB), OX40, and/or ICOS. In some embodiments, the first and second receptor include an intracellular signaling domain of a costimulatory receptor that are different. In one embodiment, the first receptor contains a CD28 costimulatory signaling region and the second receptor contain a 4-1BB co-stimulatory signaling region or vice versa.

[0330] In some embodiments, the first and/or second receptor includes both an intracellular signaling domain containing ITAM or ITAM-like motifs and an intracellular signaling domain of a costimulatory receptor.

[0331] In some embodiments, the first receptor contains an intracellular signaling domain containing ITAM or ITAM-like motifs and the second receptor contains an intracellular signaling domain of a costimulatory receptor. The costimulatory signal in combination with the activating signal induced in the same cell is one that results in an immune response, such as a robust and sustained immune response, such as increased gene expression, secretion of cytokines and other factors, and T cell mediated effector functions such as cell killing.

[0332] In some embodiments, neither ligation of the first receptor alone nor ligation of the second receptor alone induces a robust immune response. In some aspects, if only one receptor is ligated, the cell becomes tolerized or unresponsive to antigen, or inhibited, and/or is not induced to proliferate or secrete factors or carry out effector functions. In some such embodiments, however, when the plurality of receptors are ligated, such as upon encounter of a cell expressing the first and second antigens, a desired response is achieved, such as full immune activation or stimulation, e.g., as indicated by secretion of one or more cytokine, proliferation, persistence, and/or carrying out an immune effector function such as cytotoxic killing of a target cell.

[0333] In some embodiments, the two receptors induce, respectively, an activating and an inhibitory signal to the cell, such that binding by one of the receptor to its antigen activates the cell or induces a response, but binding by the second inhibitory receptor to its antigen induces a signal that suppresses or dampens that response. Examples are combinations of activating CARs and inhibitory CARs or iCARs. Such a strategy may be used, for example, in which the activating CAR binds an antigen expressed in a disease or condition but which is also expressed on normal cells, and the inhibitory receptor binds to a separate antigen which is expressed on the normal cells but not cells of the disease or condition.

[0334] In some embodiments, the multi-targeting strategy is employed in a case where an antigen associated with a particular disease or condition is expressed on a non-diseased cell and/or is expressed on the engineered cell itself, either transiently (e.g., upon stimulation in association with genetic engineering) or permanently. In such cases, by requiring ligation of two separate and individually specific antigen receptors, specificity, selectivity, and/or efficacy may be improved.

[0335] In some embodiments, the plurality of antigens, e.g., the first and second antigens, are expressed on the cell, tissue, or disease or condition being targeted, such as on the cancer cell. In some aspects, the cell, tissue, disease or condition is multiple myeloma or a multiple myeloma cell. In some embodiments, one or more of the plurality of antigens generally also is expressed on a cell which it is not desired to target with the cell therapy, such as a normal or non-diseased cell or tissue, and/or the engineered cells themselves. In such embodiments, by requiring ligation of multiple receptors to achieve a response of the cell, specificity and/or efficacy is achieved.

[0336] In some embodiments, the disease to be treated is a B cell malignancy and at least one CAR, e.g., activating CAR binds, to an antigen expressed on at least cells of the disease or condition to be treated. In some embodiments, the disease or condition is acute lymphoblastic leukemia (ALL). In some embodiments, the disease or condition is adult ALL. In some of such aspects, the antigens targeted by the receptors are B cell antigens, such as one or more of CD19, CD20 or CD20.

[0337] 3. TCRs

[0338] In some embodiments, engineered cells, such as T cells, are provided that express a T cell receptor (TCR) or antigen-binding portion thereof that recognizes an peptide epitope or T cell epitope of a target polypeptide, such as an antigen of a tumor, viral or autoimmune protein.

[0339] In some embodiments, a “T cell receptor” or “TCR” is a molecule that contains a variable α and β chains (also known as TCRα and TCRβ, respectively) or a variable γ and δ chains (also known as TCRα and TCRβ, respectively), or antigen-binding portions thereof, and which is capable of specifically binding to a peptide bound to an MHC molecule. In some embodiments, the TCR is in the αβ form. Typically, TCRs that exist in αβ and γδ forms are generally structurally similar, but T cells expressing them may have distinct anatomical locations or functions. A TCR can be found on the surface of a cell or in soluble form. Generally, a TCR is found on the surface of T cells (or T lymphocytes) where it is generally responsible for recognizing antigens bound to major histocompatibility complex (MHC) molecules.

[0340] Unless otherwise stated, the term “TCR” should be understood to encompass full TCRs as well as antigen-binding portions or antigen-binding fragments thereof. In some embodiments, the TCR is an intact or full-length TCR, including TCRs in the αβ form or γδ form. In some embodiments, the TCR is an antigen-binding portion that is less than a full-length TCR but that binds to a specific peptide bound in an MHC molecule, such as binds to an MHC-peptide complex. In some cases, an antigen-binding portion or fragment of a TCR can contain only a portion of the structural domains of a full-length or intact TCR, but yet is able to bind the peptide epitope, such as MHC-peptide complex, to which the full TCR binds. In some cases, an antigen-binding portion contains the variable domains of a TCR, such as variable a chain and variable f3 chain of a TCR, sufficient to form a binding site for binding to a specific MHC-peptide complex. Generally, the variable chains of a TCR contain complementarity determining regions involved in recognition of the peptide, MHC and/or MHC-peptide complex.

[0341] In some embodiments, the variable domains of the TCR contain hypervariable loops, or complementarity determining regions (CDRs), which generally are the primary contributors to antigen recognition and binding capabilities and specificity. In some embodiments, a CDR of a TCR or combination thereof forms all or substantially all of the antigen-binding site of a given TCR molecule. The various CDRs within a variable region of a TCR chain generally are separated by framework regions (FRs), which generally display less variability among TCR molecules as compared to the CDRs (see, e.g., Jores et al., Proc. Nat'l Acad. Sci. U.S.A. 87:9138, 1990; Chothia et al., EMBO J. 7:3745, 1988; see also Lefranc et al., Dev. Comp. Immunol. 27:55, 2003). In some embodiments, CDR3 is the main CDR responsible for antigen binding or specificity, or is the most important among the three CDRs on a given TCR variable region for antigen recognition, and/or for interaction with the processed peptide portion of the peptide-MHC complex. In some contexts, the CDR1 of the alpha chain can interact with the N-terminal part of certain antigenic peptides. In some contexts, CDR1 of the beta chain can interact with the C-terminal part of the peptide. In some contexts, CDR2 contributes most strongly to or is the primary CDR responsible for the interaction with or recognition of the MHC portion of the MHC-peptide complex. In some embodiments, the variable region of the (3-chain can contain a further hypervariable region (CDR4 or HVR4), which generally is involved in superantigen binding and not antigen recognition (Kotb (1995) Clinical Microbiology Reviews, 8:411-426).

[0342] In some embodiments, a TCR also can contain a constant domain, a transmembrane domain and/or a short cytoplasmic tail (see, e.g., Janeway et al., Immunobiology: The Immune System in Health and Disease, 3rd Ed., Current Biology Publications, p. 4:33, 1997). In some aspects, each chain of the TCR can possess one N-terminal immunoglobulin variable domain, one immunoglobulin constant domain, a transmembrane region, and a short cytoplasmic tail at the C-terminal end. In some embodiments, a TCR is associated with invariant proteins of the CD3 complex involved in mediating signal transduction.

[0343] In some embodiments, a TCR chain contains one or more constant domain. For example, the extracellular portion of a given TCR chain (e.g., α-chain or β-chain) can contain two immunoglobulin-like domains, such as a variable domain (e.g., Vα or Vβ; typically amino acids 1 to 116 based on Kabat numbering Kabat et al., “Sequences of Proteins of Immunological Interest, US Dept. Health and Human Services, Public Health Service National Institutes of Health, 1991, 5th ed.) and a constant domain (e.g., α-chain constant domain or Cα, typically positions 117 to 259 of the chain based on Kabat numbering or β chain constant domain or C_{β}, typically positions 117 to 295 of the chain based on Kabat) adjacent to the cell membrane. For example, in some cases, the extracellular portion of the TCR formed by the two chains contains two membrane-proximal constant domains, and two membrane-distal variable domains, which variable domains each contain CDRs. The constant domain of the TCR may contain short connecting sequences in which a cysteine residue forms a disulfide bond, thereby linking the two chains of the TCR. In some embodiments, a TCR may have an additional cysteine residue in each of the α and β chains, such that the TCR contains two disulfide bonds in the constant domains.

[0344] In some embodiments, the TCR chains contain a transmembrane domain. In some embodiments, the transmembrane domain is positively charged. In some cases, the TCR chain contains a cytoplasmic tail. In some cases, the structure allows the TCR to associate with other molecules like CD3 and subunits thereof. For example, a TCR containing constant domains with a transmembrane region may anchor the protein in the cell membrane and associate with invariant subunits of the CD3 signaling apparatus or complex. The intracellular tails of CD3 signaling subunits (e.g. CD3γ, CD3δ, CD3ε and CD3ζ chains) contain one or more immunoreceptor tyrosine-based activation motif or ITAM that are involved in the signaling capacity of the TCR complex.

[0345] In some embodiments, the TCR may be a heterodimer of two chains α and β (or optionally γ and δ) or it may be a single chain TCR construct. In some embodiments, the TCR is a heterodimer containing two separate chains (α and β chains or γ and δ chains) that are linked, such as by a disulfide bond or disulfide bonds.

[0346] In some embodiments, the TCR can be generated from a known TCR sequence(s), such as sequences of Vα,β chains, for which a substantially full-length coding sequence is readily available. Methods for obtaining full-length TCR sequences, including V chain sequences, from cell sources are well known. In some embodiments, nucleic acids encoding the TCR can be obtained from a variety of sources, such as by polymerase chain reaction (PCR) amplification of TCR-encoding nucleic acids within or isolated from a given cell or cells, or synthesis of publicly available TCR DNA sequences.

[0347] In some embodiments, the TCR is obtained from a biological source, such as from cells such as from a T cell (e.g. cytotoxic T cell), T-cell hybridomas or other publicly available source. In some embodiments, the T-cells can be obtained from in vivo isolated cells. In some embodiments, the TCR is a thymically selected TCR. In some embodiments, the TCR is a neoepitope-restricted TCR. In some embodiments, the T-cells can be a cultured T-cell hybridoma or clone. In some embodiments, the TCR or antigen-binding portion thereof or antigen-binding fragment thereof can be synthetically generated from knowledge of the sequence of the TCR.

[0348] In some embodiments, the TCR is generated from a TCR identified or selected from screening a library of candidate TCRs against a target polypeptide antigen, or target T cell epitope thereof. TCR libraries can be generated by amplification of the repertoire of Vα and Vβ from T cells isolated from a subject, including cells present in PBMCs, spleen or other lymphoid organ. In some cases, T cells can be amplified from tumor-infiltrating lymphocytes (TILs). In some embodiments, TCR libraries can be generated from CD4+ or CD8+ cells. In some embodiments, the TCRs can be amplified from a T cell source of a normal of healthy subject, i.e. normal TCR libraries. In some embodiments, the TCRs can be amplified from a T cell source of a diseased subject, i.e. diseased TCR libraries. In some embodiments, degenerate primers are used to amplify the gene repertoire of Va and VP, such as by RT-PCR in samples, such as T cells, obtained from humans. In some embodiments, libraries, such as single-chain TCR (scTv) libraries, can be assembled from naïve Va and VP libraries in which the amplified products are cloned or assembled to be separated by a linker. Depending on the source of the subject and cells, the libraries can be HLA allele-specific. Alternatively, in some embodiments, TCR libraries can be generated by mutagenesis or diversification of a parent or scaffold TCR molecule. In some aspects, the TCRs are subjected to directed evolution, such as by mutagenesis, e.g., of the α or β chain. In some aspects, particular residues within CDRs of the TCR are altered. In some embodiments, selected TCRs can be modified by affinity maturation. In some embodiments, antigen-specific T cells may be selected, such as by screening to assess CTL activity against the peptide. In some aspects, TCRs, e.g. present on the antigen-specific T cells, may be selected, such as by binding activity, e.g., particular affinity or avidity for the antigen.

[0349] In some embodiments, the TCR or antigen-binding portion thereof is one that has been modified or engineered. In some embodiments, directed evolution methods are used to generate TCRs with altered properties, such as with higher affinity for a specific MHC-peptide complex. In some embodiments, directed evolution is achieved by display methods including, but not limited to, yeast display (Holler et al. (2003) Nat Immunol, 4, 55-62; Holler et al. (2000) Proc Natl Acad Sci USA, 97, 5387-92), phage display (Li et al. (2005) Nat Biotechnol, 23, 349-54), or T cell display (Chervin et al. (2008) J Immunol Methods, 339, 175-84). In some embodiments, display approaches involve engineering, or modifying, a known, parent or reference TCR. For example, in some cases, a wild-type TCR can be used as a template for producing mutagenized TCRs in which in one or more residues of the CDRs are mutated, and mutants with an desired altered property, such as higher affinity for a desired target antigen, are selected.

[0350] In some embodiments, peptides of a target polypeptide for use in producing or generating a TCR of interest are known or can be readily identified. In some embodiments, peptides suitable for use in generating TCRs or antigen-binding portions can be determined based on the presence of an HLA-restricted motif in a target polypeptide of interest, such as a target polypeptide described below. In some embodiments, peptides are identified using available computer prediction models. In some embodiments, for predicting MHC class I binding sites, such models include, but are not limited to, ProPredl (Singh and Raghava (2001) Bioinformatics 17(12):1236-1237, and SYFPEITHI (see Schuler et al. (2007) Immunoinformatics Methods in Molecular Biology, 409(1): 75-93 2007). In some embodiments, the MHC-restricted epitope is HLA-A0201, which is expressed in approximately 39-46% of all Caucasians and therefore, represents a suitable choice of MHC antigen for use preparing a TCR or other MHC-peptide binding molecule.

[0351] HLA-A0201-binding motifs and the cleavage sites for proteasomes and immune-proteasomes using computer prediction models are known. For predicting MHC class I binding sites, such models include, but are not limited to, ProPredl (described in more detail in Singh and Raghava, ProPred: prediction of HLA-DR binding sites. BIOINFORMATICS 17(12):1236-1237 2001), and SYFPEITHI (see Schuler et al. SYFPEITHI, Database for Searching and T-Cell Epitope Prediction. in Immunoinformatics Methods in Molecular Biology, vol. 409(1): 75-93 2007)

[0352] In some embodiments, the TCR or antigen binding portion thereof may be a recombinantly produced natural protein or mutated form thereof in which one or more property, such as binding characteristic, has been altered. In some embodiments, a TCR may be derived from one of various animal species, such as human, mouse, rat, or other mammal. A TCR may be cell-bound or in soluble form. In some embodiments, for purposes of the provided methods, the TCR is in cell-bound form expressed on the surface of a cell.

[0353] In some embodiments, the TCR is a full-length TCR. In some embodiments, the TCR is an antigen-binding portion. In some embodiments, the TCR is a dimeric TCR (dTCR). In some embodiments, the TCR is a single-chain TCR (sc-TCR). In some embodiments, a dTCR or scTCR have the structures as described in WO 03/020763, WO 04/033685, and WO2011/044186.

[0354] In some embodiments, the TCR contains a sequence corresponding to the transmembrane sequence. In some embodiments, the TCR does contain a sequence corresponding to cytoplasmic sequences. In some embodiments, the TCR is capable of forming a TCR complex with CD3. In some embodiments, any of the TCRs, including a dTCR or scTCR, can be linked to signaling domains that yield an active TCR on the surface of a T cell. In some embodiments, the TCR is expressed on the surface of cells.

[0355] In some embodiments a dTCR contains a first polypeptide wherein a sequence corresponding to a TCR α chain variable region sequence is fused to the N terminus of a sequence corresponding to a TCR α chain constant region extracellular sequence, and a second polypeptide wherein a sequence corresponding to a TCR β chain variable region sequence is fused to the N terminus a sequence corresponding to a TCR β chain constant region extracellular sequence, the first and second polypeptides being linked by a disulfide bond. In some embodiments, the bond can correspond to the native inter-chain disulfide bond present in native dimeric αβ TCRs. In some embodiments, the interchain disulfide bonds are not present in a native TCR. For example, in some embodiments, one or more cysteines can be incorporated into the constant region extracellular sequences of dTCR polypeptide pair. In some cases, both a native and a non-native disulfide bond may be desirable. In some embodiments, the TCR contains a transmembrane sequence to anchor to the membrane.

[0356] In some embodiments, a dTCR contains a TCR a chain containing a variable a domain, a constant α domain and a first dimerization motif attached to the C-terminus of the constant α domain, and a TCR β chain comprising a variable β domain, a constant β domain and a first dimerization motif attached to the C-terminus of the constant β domain, wherein the first and second dimerization motifs easily interact to form a covalent bond between an amino acid in the first dimerization motif and an amino acid in the second dimerization motif linking the TCR α chain and TCR β chain together.

[0357] In some embodiments, the TCR is a scTCR. Typically, a scTCR can be generated using methods known, See e.g., Soo Hoo, W. F. et al. PNAS (USA) 89, 4759 (1992); Wülfing, C. and Plückthun, A., J. Mol. Biol. 242, 655 (1994); Kurucz, I. et al. PNAS (USA) 90 3830 (1993); International published PCT Nos. WO 96/13593, WO 96/18105, WO99/60120, WO99/18129, WO 03/020763, WO2011/044186; and Schlueter, C. J. et al. J. Mol. Biol. 256, 859 (1996). In some embodiments, a scTCR contains an introduced non-native disulfide interchain bond to facilitate the association of the TCR chains (see e.g. International published PCT No. WO 03/020763). In some embodiments, a scTCR is a non-disulfide linked truncated TCR in which heterologous leucine zippers fused to the C-termini thereof facilitate chain association (see e.g. International published PCT No. WO99/60120). In some embodiments, a scTCR contain a TCRα variable domain covalently linked to a TCRβ variable domain via a peptide linker (see e.g., International published PCT No. WO99/18129).

[0358] In some embodiments, a scTCR contains a first segment constituted by an amino acid sequence corresponding to a TCR α chain variable region, a second segment constituted by an amino acid sequence corresponding to a TCR β chain variable region sequence fused to the N terminus of an amino acid sequence corresponding to a TCR β chain constant domain extracellular sequence, and a linker sequence linking the C terminus of the first segment to the N terminus of the second segment.

[0359] In some embodiments, a scTCR contains a first segment constituted by an a chain variable region sequence fused to the N terminus of an α chain extracellular constant domain sequence, and a second segment constituted by a β chain variable region sequence fused to the N terminus of a sequence β chain extracellular constant and transmembrane sequence, and, optionally, a linker sequence linking the C terminus of the first segment to the N terminus of the second segment.

[0360] In some embodiments, a scTCR contains a first segment constituted by a TCR β chain variable region sequence fused to the N terminus of a β chain extracellular constant domain sequence, and a second segment constituted by an α chain variable region sequence fused to the N terminus of a sequence a chain extracellular constant and transmembrane sequence, and, optionally, a linker sequence linking the C terminus of the first segment to the N terminus of the second segment.

[0361] In some embodiments, the linker of a scTCRs that links the first and second TCR segments can be any linker capable of forming a single polypeptide strand, while retaining TCR binding specificity. In some embodiments, the linker sequence may, for example, have the formula -P-AA-P- wherein P is proline and AA represents an amino acid sequence wherein the amino acids are glycine and serine. In some embodiments, the first and second segments are paired so that the variable region sequences thereof are orientated for such binding. Hence, in some cases, the linker has a sufficient length to span the distance between the C terminus of the first segment and the N terminus of the second segment, or vice versa, but is not too long to block or reduces bonding of the scTCR to the target ligand. In some embodiments, the linker can contain from or from about 10 to 45 amino acids, such as 10 to 30 amino acids or 26 to 41 amino acids residues, for example 29, 30, 31 or 32 amino acids. In some embodiments, the linker has the formula -PGGG-(SGGGG)5-P- wherein P is proline, G is glycine and S is serine (SEQ ID NO:173). In some embodiments, the linker has the sequence GSADDAKKDAAKKDGKS (SEQ ID NO:174)

[0362] In some embodiments, the scTCR contains a covalent disulfide bond linking a residue of the immunoglobulin region of the constant domain of the a chain to a residue of the immunoglobulin region of the constant domain of the β chain. In some embodiments, the interchain disulfide bond in a native TCR is not present. For example, in some embodiments, one or more cysteines can be incorporated into the constant region extracellular sequences of the first and second segments of the scTCR polypeptide. In some cases, both a native and a non-native disulfide bond may be desirable.

[0363] In some embodiments of a dTCR or scTCR containing introduced interchain disulfide bonds, the native disulfide bonds are not present. In some embodiments, the one or more of the native cysteines forming a native interchain disulfide bonds are substituted to another residue, such as to a serine or alanine. In some embodiments, an introduced disulfide bond can be formed by mutating non-cysteine residues on the first and second segments to cysteine. Exemplary non-native disulfide bonds of a TCR are described in published International PCT No. WO2006/000830.

[0364] In some embodiments, the TCR or antigen-binding fragment thereof exhibits an affinity with an equilibrium binding constant for a target antigen of between or between about 10-5 and 10-12 M and all individual values and ranges therein. In some embodiments, the target antigen is an MHC-peptide complex or ligand.

[0365] In some embodiments, nucleic acid or nucleic acids encoding a TCR, such as α and β chains, can be amplified by PCR, cloning or other suitable means and cloned into a suitable expression vector or vectors. The expression vector can be any suitable recombinant expression vector, and can be used to transform or transfect any suitable host. Suitable vectors include those designed for propagation and expansion or for expression or both, such as plasmids and viruses.

[0366] In some embodiments, the vector can a vector of the pUC series (Fermentas Life Sciences), the pBluescript series (Stratagene, La Jolla, Calif.), the pET series (Novagen, Madison, Wis.), the pGEX series (Pharmacia Biotech, Uppsala, Sweden), or the pEX series (Clontech, Palo Alto, Calif.). In some cases, bacteriophage vectors, such as λG10,λGT11, λZapII (Stratagene), λEMBL4, and λNM1149, also can be used. In some embodiments, plant expression vectors can be used and include pBI01, pBI101.2, pBI101.3, pBI121 and pBIN19 (Clontech). In some embodiments, animal expression vectors include pEUK-C1, pMAM and pMAMneo (Clontech). In some embodiments, a viral vector is used, such as a retroviral vector.

[0367] In some embodiments, the recombinant expression vectors can be prepared using standard recombinant DNA techniques. In some embodiments, vectors can contain regulatory sequences, such as transcription and translation initiation and termination codons, which are specific to the type of host (e.g., bacterium, fungus, plant, or animal) into which the vector is to be introduced, as appropriate and taking into consideration whether the vector is DNA- or RNA-based. In some embodiments, the vector can contain a nonnative promoter operably linked to the nucleotide sequence encoding the TCR or antigen-binding portion (or other MHC-peptide binding molecule). In some embodiments, the promoter can be a non-viral promoter or a viral promoter, such as a cytomegalovirus (CMV) promoter, an SV40 promoter, an RSV promoter, and a promoter found in the long-terminal repeat of the murine stem cell virus. Other known promoters also are contemplated.

[0368] In some embodiments, to generate a vector encoding a TCR, the α and β chains are PCR amplified from total cDNA isolated from a T cell clone expressing the TCR of interest and cloned into an expression vector. In some embodiments, the α and β chains are cloned into the same vector. In some embodiments, the α and β chains are cloned into different vectors. In some embodiments, the generated α and β chains are incorporated into a retroviral, e.g. lentiviral, vector. Genetically Engineered Cells and Methods of Producing Cells

[0369] In some embodiments, the provided methods involve administering to a subject having a disease or condition cells expressing a recombinant antigen receptor. Various methods for the introduction of genetically engineered components, e.g., recombinant receptors, e.g., CARs or TCRs, are well known and may be used with the provided methods and compositions. Exemplary methods include those for transfer of nucleic acids encoding the receptors, including via viral, e.g., retroviral or lentiviral, transduction, transposons, and electroporation.

[0370] Among the cells expressing the receptors and administered by the provided methods are engineered cells. The genetic engineering generally involves introduction of a nucleic acid encoding the recombinant or engineered component into a composition containing the cells, such as by retroviral transduction, transfection, or transformation.

[0371] 4. Vectors and Methods for Genetic Engineering

[0372] In some embodiments, recombinant nucleic acids are transferred into cells using recombinant infectious virus particles, such as, e.g., vectors derived from simian virus 40 (SV40), adenoviruses, adeno-associated virus (AAV). In some embodiments, recombinant nucleic acids are transferred into T cells using recombinant lentiviral vectors or retroviral vectors, such as gamma-retroviral vectors (see, e.g., Koste et al. (2014) Gene Therapy 2014 Apr. 3. doi: 10.1038/gt.2014.25; Carlens et al. (2000) Exp Hematol 28(10): 1137-46; Alonso-Camino et al. (2013) Mol Ther Nucl Acids 2, e93; Park et al., Trends Biotechnol. 2011 Nov. 29(11): 550-557.

[0373] In some embodiments, the retroviral vector has a long terminal repeat sequence (LTR), e.g., a retroviral vector derived from the Moloney murine leukemia virus (MoMLV), myeloproliferative sarcoma virus (MPSV), murine embryonic stem cell virus (MESV), murine stem cell virus (MSCV), spleen focus forming virus (SFFV). Most retroviral vectors are derived from murine retroviruses. In some embodiments, the retroviruses include those derived from any avian or mammalian cell source. The retroviruses typically are amphotropic, meaning that they are capable of infecting host cells of several species, including humans. In one embodiment, the gene to be expressed replaces the retroviral gag, pol and/or env sequences. A number of illustrative retroviral systems have been described (e.g., U.S. Pat. Nos. 5,219,740; 6,207,453; 5,219,740; Miller and Rosman (1989) BioTechniques 7:980-990; Miller, A. D. (1990) Human Gene Therapy 1:5-14; Scarpa et al. (1991) Virology 180:849-852; Burns et al. (1993) Proc. Natl. Acad. Sci. USA 90:8033-8037; and Boris-Lawrie and Temin (1993) Cur. Opin. Genet. Develop. 3:102-109.

[0374] Methods of lentiviral transduction are known. Exemplary methods are described in, e.g., Wang et al. (2012) J. Immunother. 35(9): 689-701; Cooper et al. (2003) Blood. 101:1637-1644; Verhoeyen et al. (2009) Methods Mol Biol. 506: 97-114; and Cavalieri et al. (2003) Blood. 102(2): 497-505.

[0375] In some embodiments, recombinant nucleic acids are transferred into T cells via electroporation (see, e.g., Chicaybam et al, (2013) PLoS ONE 8(3): e60298 and Van Tedeloo et al. (2000) Gene Therapy 7(16): 1431-1437). In some embodiments, recombinant nucleic acids are transferred into T cells via transposition (see, e.g., Manuri et al. (2010) Hum Gene Ther 21(4): 427-437; Sharma et al. (2013) Molec Ther Nucl Acids 2, e74; and Huang et al. (2009) Methods Mol Biol 506: 115-126). Other methods of introducing and expressing genetic material in immune cells include calcium phosphate transfection (e.g., as described in Current Protocols in Molecular Biology, John Wiley & Sons, New York. N.Y.), protoplast fusion, cationic liposome-mediated transfection; tungsten particle-facilitated microparticle bombardment (Johnston, Nature, 346: 776-777 (1990)); and strontium phosphate DNA co-precipitation (Brash et al., Mol. Cell Biol., 7: 2031-2034 (1987)).

[0376] Other approaches and vectors for transfer of the nucleic acids encoding the recombinant products are those described, e.g., in international patent application, Publication No.: W02014055668, and U.S. Patent No. 7,446,190.

[0377] In some embodiments, the cells, e.g., T cells, may be transfected either during or after expansion e.g. with a T cell receptor (TCR) or a chimeric antigen receptor (CAR). This transfection for the introduction of the gene of the desired receptor can be carried out with any suitable retroviral vector, for example. The genetically modified cell population can then be liberated from the initial stimulus (the anti-CD3/anti-CD28 stimulus, for example) and subsequently be stimulated with a second type of stimulus e.g. via a de novo introduced receptor). This second type of stimulus may include an antigenic stimulus in form of a peptide/MHC molecule, the cognate (cross-linking) ligand of the genetically introduced receptor (e.g. natural ligand of a CAR) or any ligand (such as an antibody) that directly binds within the framework of the new receptor (e.g. by recognizing constant regions within the receptor). See, for example, Cheadle et al, “Chimeric antigen receptors for T-cell based therapy” Methods Mol Biol. 2012; 907:645-66 or Barrett et al., Chimeric Antigen Receptor Therapy for Cancer Annual Review of Medicine Vol. 65: 333-347 (2014).

[0378] In some cases, a vector may be used that does not require that the cells, e.g., T cells, are activated. In some such instances, the cells may be selected and/or transduced prior to activation. Thus, the cells may be engineered prior to, or subsequent to culturing of the cells, and in some cases at the same time as or during at least a portion of the culturing.

[0379] Among additional nucleic acids, e.g., genes for introduction are those to improve the efficacy of therapy, such as by promoting viability and/or function of transferred cells; genes to provide a genetic marker for selection and/or evaluation of the cells, such as to assess in vivo survival or localization; genes to improve safety, for example, by making the cell susceptible to negative selection in vivo as described by Lupton S. D. et al., Mol. and Cell Biol., 11:6 (1991); and Riddell et al., Human Gene Therapy 3:319-338 (1992); see also the publications of PCT/US91/08442 and PCT/US94/05601 by Lupton et al. describing the use of bifunctional selectable fusion genes derived from fusing a dominant positive selectable marker with a negative selectable marker. See, e.g., Riddell et al., U.S. Pat. No. 6,040,177, at columns 14-17.

[0380] In some embodiments, the vector contains a nucleic acid sequence encoding one or more marker(s). In some embodiments, the one or more marker(s) is a transduction marker, surrogate marker and/or a selection marker.

[0381] In some embodiments, the marker is a transduction marker or a surrogate marker. A transduction marker or a surrogate marker can be used to detect cells that have been introduced with the polynucleotide, e.g., a polynucleotide encoding a recombinant receptor. In some embodiments, the transduction marker can indicate or confirm modification of a cell. In some embodiments, the surrogate marker is a protein that is made to be co-expressed on the cell surface with the recombinant receptor, e.g. CAR. In particular embodiments, such a surrogate marker is a surface protein that has been modified to have little or no activity. In certain embodiments, the surrogate marker is encoded on the same polynucleotide that encodes the recombinant receptor. In some embodiments, the nucleic acid sequence encoding the recombinant receptor is operably linked to a nucleic acid sequence encoding a marker, optionally separated by an internal ribosome entry site (IRES), or a nucleic acid encoding a self-cleaving peptide or a peptide that causes ribosome skipping, such as a 2A sequence, such as a T2A, a P2A, an E2A or an F2A. Extrinsic marker genes may in some cases be utilized in connection with engineered cell to permit detection or selection of cells and, in some cases, also to promote cell suicide.

[0382] Exemplary surrogate markers can include truncated forms of cell surface polypeptides, such as truncated forms that are non-functional and to not transduce or are not capable of transducing a signal or a signal ordinarily transduced by the full-length form of the cell surface polypeptide, and/or do not or are not capable of internalizing. Exemplary truncated cell surface polypeptides including truncated forms of growth factors or other receptors such as a truncated human epidermal growth factor receptor 2 (tHER2), a truncated epidermal growth factor receptor (tEGFR, exemplary tEGFR sequence set forth in SEQ ID NO: 153 or 162) or a prostate-specific membrane antigen (PSMA) or modified form thereof. tEGFR may contain an epitope recognized by the antibody cetuximab (Erbitux®) or other therapeutic anti-EGFR antibody or binding molecule, which can be used to identify or select cells that have been engineered with the tEGFR construct and an encoded exogenous protein, and/or to eliminate or separate cells expressing the encoded exogenous protein. See U.S. Pat. No. 8,802,374 and Liu et al., Nature Biotech. 2016 April; 34(4): 430-434). In some aspects, the marker, e.g. surrogate marker, includes all or part (e.g., truncated form) of CD34, a NGFR, a CD19 or a truncated CD19, e.g., a truncated non-human CD19, or epidermal growth factor receptor (e.g., tEGFR). In some embodiments, the marker is or comprises a fluorescent protein, such as green fluorescent protein (GFP), enhanced green fluorescent protein (EGFP), such as super-fold GFP (sfGFP), red fluorescent protein (RFP), such as tdTomato, mCherry, mStrawberry, AsRed2, DsRed or DsRed2, cyan fluorescent protein (CFP), blue green fluorescent protein (BFP), enhanced blue fluorescent protein (EBFP), and yellow fluorescent protein (YFP), and variants thereof, including species variants, monomeric variants, and codon-optimized and/or enhanced variants of the fluorescent proteins. In some embodiments, the marker is or comprises an enzyme, such as a luciferase, the lacZ gene from E. coli, alkaline phosphatase, secreted embryonic alkaline phosphatase (SEAP), chloramphenicol acetyl transferase (CAT). Exemplary light-emitting reporter genes include luciferase (luc), β-galactosidase, chloramphenicol acetyltransferase (CAT), β-glucuronidase (GUS) or variants thereof.

[0383] In some embodiments, the marker is a selection marker. In some embodiments, the selection marker is or comprises a polypeptide that confers resistance to exogenous agents or drugs. In some embodiments, the selection marker is an antibiotic resistance gene. In some embodiments, the selection marker is an antibiotic resistance gene confers antibiotic resistance to a mammalian cell. In some embodiments, the selection marker is or comprises a Puromycin resistance gene, a Hygromycin resistance gene, a Blasticidin resistance gene, a Neomycin resistance gene, a Geneticin resistance gene or a Zeocin resistance gene or a modified form thereof.

[0384] In some embodiments, the nucleic acid encoding the marker is operably linked to a polynucleotide encoding for a linker sequence, such as a cleavable linker sequence, e.g., a T2A. For example, a marker, and optionally a linker sequence, can be any as disclosed in PCT Pub. No. WO2014031687. For example, the marker can be a truncated EGFR (tEGFR) that is, optionally, linked to a linker sequence, such as a T2A cleavable linker sequence. An exemplary polypeptide for a truncated EGFR (e.g. tEGFR) comprises the sequence of amino acids set forth in SEQ ID NO: 153 or 162 or a sequence of amino acids that exhibits at least 85%, 86%, 87%, 88%, 89%, 90%, 91%, 92%, 93%, 94%, 95%, 96%, 97%, 98%, 99% or more sequence identity to SEQ ID NO: 153 or 162.

[0385] 5. Cells and Preparation of Cells for Genetic Engineering

[0386] In some embodiments, the nucleic acids are heterologous, i.e., normally not present in a cell or sample obtained from the cell, such as one obtained from another organism or cell, which for example, is not ordinarily found in the cell being engineered and/or an organism from which such cell is derived. In some embodiments, the nucleic acids are not naturally occurring, such as a nucleic acid not found in nature, including one comprising chimeric combinations of nucleic acids encoding various domains from multiple different cell types.

[0387] The cells generally are eukaryotic cells, such as mammalian cells, and typically are human cells. In some embodiments, the cells are derived from the blood, bone marrow, lymph, or lymphoid organs, are cells of the immune system, such as cells of the innate or adaptive immunity, e.g., myeloid or lymphoid cells, including lymphocytes, typically T cells and/or NK cells. Other exemplary cells include stem cells, such as multipotent and pluripotent stem cells, including induced pluripotent stem cells (iPSCs). The cells typically are primary cells, such as those isolated directly from a subject and/or isolated from a subject and frozen. In some embodiments, the cells include one or more subsets of T cells or other cell types, such as whole T cell populations, CD4+ cells, CD8+ cells, and subpopulations thereof, such as those defined by function, activation state, maturity, potential for differentiation, expansion, recirculation, localization, and/or persistence capacities, antigen-specificity, type of antigen receptor, presence in a particular organ or compartment, marker or cytokine secretion profile, and/or degree of differentiation. With reference to the subject to be treated, the cells may be allogeneic and/or autologous. Among the methods include off-the-shelf methods. In some aspects, such as for off-the-shelf technologies, the cells are pluripotent and/or multipotent, such as stem cells, such as induced pluripotent stem cells (iPSCs). In some embodiments, the methods include isolating cells from the subject, preparing, processing, culturing, and/or engineering them, and re-introducing them into the same subject, before or after cryopreservation.

[0388] Among the sub-types and subpopulations of T cells and/or of CD4+ and/or of CD8+ T cells are naïve T (T_{N}) cells, effector T cells (T_{EFF})_{,} memory T cells and sub-types thereof, such as stem cell memory T (T_{SCM}), central memory T (T_{CM}), effector memory T (T_{EM}), or terminally differentiated effector memory T cells, tumor-infiltrating lymphocytes (TIL), immature T cells, mature T cells, helper T cells, cytotoxic T cells, mucosa-associated invariant T (MAIT) cells, naturally occurring and adaptive regulatory T (Treg) cells, helper T cells, such as TH1 cells, TH2 cells, TH3 cells, TH17 cells, TH9 cells, TH22 cells, follicular helper T cells, alpha/beta T cells, and delta/gamma T cells.

[0389] In some embodiments, the cells are natural killer (NK) cells. In some embodiments, the cells are monocytes or granulocytes, e.g., myeloid cells, macrophages, neutrophils, dendritic cells, mast cells, eosinophils, and/or basophils.

[0390] In some embodiments, the cells include one or more nucleic acids introduced via genetic engineering, and thereby express recombinant or genetically engineered products of such nucleic acids. In some embodiments, the nucleic acids are heterologous, i.e., normally not present in a cell or sample obtained from the cell, such as one obtained from another organism or cell, which for example, is not ordinarily found in the cell being engineered and/or an organism from which such cell is derived. In some embodiments, the nucleic acids are not naturally occurring, such as a nucleic acid not found in nature, including one comprising chimeric combinations of nucleic acids encoding various domains from multiple different cell types.

[0391] In some embodiments, preparation of the engineered cells includes one or more culture and/or preparation steps. The cells for introduction of the nucleic acid encoding the transgenic receptor such as the CAR, may be isolated from a sample, such as a biological sample, e.g., one obtained from or derived from a subject. In some embodiments, the subject from which the cell is isolated is one having the disease or condition or in need of a cell therapy or to which cell therapy will be administered. The subject in some embodiments is a human in need of a particular therapeutic intervention, such as the adoptive cell therapy for which cells are being isolated, processed, and/or engineered.

[0392] Accordingly, the cells in some embodiments are primary cells, e.g., primary human cells. The samples include tissue, fluid, and other samples taken directly from the subject, as well as samples resulting from one or more processing steps, such as separation, centrifugation, genetic engineering (e.g. transduction with viral vector), washing, and/or incubation. The biological sample can be a sample obtained directly from a biological source or a sample that is processed. Biological samples include, but are not limited to, body fluids, such as blood, plasma, serum, cerebrospinal fluid, synovial fluid, urine and sweat, tissue and organ samples, including processed samples derived therefrom.

[0393] In some aspects, the sample from which the cells are derived or isolated is blood or a blood-derived sample, or is or is derived from an apheresis or leukapheresis product. Exemplary samples include whole blood, peripheral blood mononuclear cells (PBMCs), leukocytes, bone marrow, thymus, tissue biopsy, tumor, leukemia, lymphoma, lymph node, gut associated lymphoid tissue, mucosa associated lymphoid tissue, spleen, other lymphoid tissues, liver, lung, stomach, intestine, colon, kidney, pancreas, breast, bone, prostate, cervix, testes, ovaries, tonsil, or other organ, and/or cells derived therefrom. Samples include, in the context of cell therapy, e.g., adoptive cell therapy, samples from autologous and allogeneic sources.

[0394] In some embodiments, the cells are derived from cell lines, e.g., T cell lines. The cells in some embodiments are obtained from a xenogeneic source, for example, from mouse, rat, non-human primate, and pig.

[0395] In some embodiments, isolation of the cells includes one or more preparation and/or non-affinity based cell separation steps. In some examples, cells are washed, centrifuged, and/or incubated in the presence of one or more reagents, for example, to remove unwanted components, enrich for desired components, lyse or remove cells sensitive to particular reagents. In some examples, cells are separated based on one or more property, such as density, adherent properties, size, sensitivity and/or resistance to particular components.

[0396] In some examples, cells from the circulating blood of a subject are obtained, e.g., by apheresis or leukapheresis. The samples, in some aspects, contain lymphocytes, including T cells, monocytes, granulocytes, B cells, other nucleated white blood cells, red blood cells, and/or platelets, and in some aspects contains cells other than red blood cells and platelets.

[0397] In some embodiments, the blood cells collected from the subject are washed, e.g., to remove the plasma fraction and to place the cells in an appropriate buffer or media for subsequent processing steps. In some embodiments, the cells are washed with phosphate buffered saline (PBS). In some embodiments, the wash solution lacks calcium and/or magnesium and/or many or all divalent cations. In some aspects, a washing step is accomplished a semi-automated “flow-through” centrifuge (for example, the Cobe 2991 cell processor, Baxter) according to the manufacturer's instructions. In some aspects, a washing step is accomplished by tangential flow filtration (TFF) according to the manufacturer's instructions. In some embodiments, the cells are resuspended in a variety of biocompatible buffers after washing, such as, for example, Ca⁺⁺/Mg⁺⁺ free PBS. In certain embodiments, components of a blood cell sample are removed and the cells directly resuspended in culture media.

[0398] In some embodiments, the methods include density-based cell separation methods, such as the preparation of white blood cells from peripheral blood by lysing the red blood cells and centrifugation through a Percoll or Ficoll gradient.

[0399] In some embodiments, the isolation methods include the separation of different cell types based on the expression or presence in the cell of one or more specific molecules, such as surface markers, e.g., surface proteins, intracellular markers, or nucleic acid. In some embodiments, any known method for separation based on such markers may be used. In some embodiments, the separation is affinity- or immunoaffinity-based separation. For example, the isolation in some aspects includes separation of cells and cell populations based on the cells' expression or expression level of one or more markers, typically cell surface markers, for example, by incubation with an antibody or binding partner that specifically binds to such markers, followed generally by washing steps and separation of cells having bound the antibody or binding partner, from those cells having not bound to the antibody or binding partner.

[0400] Such separation steps can be based on positive selection, in which the cells having bound the reagents are retained for further use, and/or negative selection, in which the cells having not bound to the antibody or binding partner are retained. In some examples, both fractions are retained for further use. In some aspects, negative selection can be particularly useful where no antibody is available that specifically identifies a cell type in a heterogeneous population, such that separation is best carried out based on markers expressed by cells other than the desired population.

[0401] The separation need not result in 100% enrichment or removal of a particular cell population or cells expressing a particular marker. For example, positive selection of or enrichment for cells of a particular type, such as those expressing a marker, refers to increasing the number or percentage of such cells, but need not result in a complete absence of cells not expressing the marker. Likewise, negative selection, removal, or depletion of cells of a particular type, such as those expressing a marker, refers to decreasing the number or percentage of such cells, but need not result in a complete removal of all such cells.

[0402] In some examples, multiple rounds of separation steps are carried out, where the positively or negatively selected fraction from one step is subjected to another separation step, such as a subsequent positive or negative selection. In some examples, a single separation step can deplete cells expressing multiple markers simultaneously, such as by incubating cells with a plurality of antibodies or binding partners, each specific for a marker targeted for negative selection. Likewise, multiple cell types can simultaneously be positively selected by incubating cells with a plurality of antibodies or binding partners expressed on the various cell types.

[0403] For example, in some aspects, specific subpopulations of T cells, such as cells positive or expressing high levels of one or more surface markers, e.g., CD28⁺, CD62L⁺, CCR7⁺, CD27⁺, CD127⁺, CD4⁺, CD8⁺, CD45RA⁺, and/or CD45RO⁺ T cells, are isolated by positive or negative selection techniques.

[0404] For example, CD3⁺, CD28⁺ T cells can be positively selected using anti-CD3/anti-CD28 conjugated magnetic beads (e.g., DYNABEADS® M-450 CD3/CD28 T Cell Expander).

[0405] In some embodiments, isolation is carried out by enrichment for a particular cell population by positive selection, or depletion of a particular cell population, by negative selection. In some embodiments, positive or negative selection is accomplished by incubating cells with one or more antibodies or other binding agent that specifically bind to one or more surface markers expressed or expressed (marker⁺) at a relatively higher level (marker^{high}) on the positively or negatively selected cells, respectively.

[0406] In some embodiments, T cells are separated from a PBMC sample by negative selection of markers expressed on non-T cells, such as B cells, monocytes, or other white blood cells, such as CD14. In some aspects, a CD4⁺ or CD8⁺ selection step is used to separate CD4⁺ helper and CD8⁺ cytotoxic T cells. Such CD4⁺ and CD8⁺ populations can be further sorted into sub-populations by positive or negative selection for markers expressed or expressed to a relatively higher degree on one or more naive, memory, and/or effector T cell subpopulations.

[0407] In some embodiments, CD8⁺ cells are further enriched for or depleted of naive, central memory, effector memory, and/or central memory stem cells, such as by positive or negative selection based on surface antigens associated with the respective subpopulation. In some embodiments, enrichment for central memory T (T_{CM}) cells is carried out to increase efficacy, such as to improve long-term survival, expansion, and/or engraftment following administration, which in some aspects is particularly robust in such sub-populations. See Terakura et al. (2012) Blood.1:72-82; Wang et al. (2012) J Immunother. 35(9):689-701. In some embodiments, combining T_{CM}-enriched CD8⁺ T cells and CD4⁺ T cells further enhances efficacy.

[0408] In embodiments, memory T cells are present in both CD62L⁺ and CD62L⁻ subsets of CD8⁺ peripheral blood lymphocytes. PBMC can be enriched for or depleted of CD62L⁻CD8⁺ and/or CD62L⁺CD8⁺ fractions, such as using anti-CD8 and anti-CD62L antibodies.

[0409] In some embodiments, the enrichment for central memory T (T_{CM}) cells is based on positive or high surface expression of CD45RO, CD62L, CCR7, CD28, CD3, and/or CD127; in some aspects, it is based on negative selection for cells expressing or highly expressing CD45RA and/or granzyme B. In some aspects, isolation of a CD8⁺ population enriched for T_{CM} cells is carried out by depletion of cells expressing CD4, CD14, CD45RA, and positive selection or enrichment for cells expressing CD62L. In one aspect, enrichment for central memory T (T_{CM}) cells is carried out starting with a negative fraction of cells selected based on CD4 expression, which is subjected to a negative selection based on expression of CD14 and CD45RA, and a positive selection based on CD62L. Such selections in some aspects are carried out simultaneously and in other aspects are carried out sequentially, in either order. In some aspects, the same CD4 expression-based selection step used in preparing the CD8⁺ cell population or subpopulation, also is used to generate the CD4⁺ cell population or sub-population, such that both the positive and negative fractions from the CD4-based separation are retained and used in subsequent steps of the methods, optionally following one or more further positive or negative selection steps.

[0410] In a particular example, a sample of PBMCs or other white blood cell sample is subjected to selection of CD4⁺ cells, where both the negative and positive fractions are retained. The negative fraction then is subjected to negative selection based on expression of CD14 and CD45RA or CD19, and positive selection based on a marker characteristic of central memory T cells, such as CD62L or CCR7, where the positive and negative selections are carried out in either order.

[0411] CD4⁺ T helper cells are sorted into naïve, central memory, and effector cells by identifying cell populations that have cell surface antigens. CD4⁺ lymphocytes can be obtained by standard methods. In some embodiments, naive CD4⁺ T lymphocytes are CD45RO⁻, CD45RA⁺, CD62L⁺, or CD4⁺ T cells. In some embodiments, central memory CD4⁺ cells are CD62L⁺ and CD45RO⁺. In some embodiments, effector CD4⁺ cells are CD62L⁻ and CD45RO⁻.

[0412] In one example, to enrich for CD4⁺ cells by negative selection, a monoclonal antibody cocktail typically includes antibodies to CD14, CD20, CD11b, CD16, HLA-DR, and CD8. In some embodiments, the antibody or binding partner is bound to a solid support or matrix, such as a magnetic bead or paramagnetic bead, to allow for separation of cells for positive and/or negative selection. For example, in some embodiments, the cells and cell populations are separated or isolated using immunomagnetic (or affinitymagnetic) separation techniques (reviewed in Methods in Molecular Medicine, vol. 58: Metastasis Research Protocols, Vol. 2: Cell Behavior In Vitro and In Vivo, p 17-25 Edited by: S. A. Brooks and U. Schumacher© Humana Press Inc., Totowa, N.J.).

[0413] In some aspects, the sample or composition of cells to be separated is incubated with small, magnetizable or magnetically responsive material, such as magnetically responsive particles or microparticles, such as paramagnetic beads (e.g., such as Dynabeads or MACS beads). The magnetically responsive material, e.g., particle, generally is directly or indirectly attached to a binding partner, e.g., an antibody, that specifically binds to a molecule, e.g., surface marker, present on the cell, cells, or population of cells that it is desired to separate, e.g., that it is desired to negatively or positively select.

[0414] In some embodiments, the magnetic particle or bead comprises a magnetically responsive material bound to a specific binding member, such as an antibody or other binding partner. There are many well-known magnetically responsive materials used in magnetic separation methods. Suitable magnetic particles include those described in Molday, U.S. Pat. No. 4,452,773, and in European Patent Specification EP 452342 B, which are hereby incorporated by reference. Colloidal sized particles, such as those described in Owen U.S. Pat. No. 4,795,698, and Liberti et al., U.S. Pat. No. 5,200,084 are other examples.

[0415] The incubation generally is carried out under conditions whereby the antibodies or binding partners, or molecules, such as secondary antibodies or other reagents, which specifically bind to such antibodies or binding partners, which are attached to the magnetic particle or bead, specifically bind to cell surface molecules if present on cells within the sample.

[0416] In some aspects, the sample is placed in a magnetic field, and those cells having magnetically responsive or magnetizable particles attached thereto will be attracted to the magnet and separated from the unlabeled cells. For positive selection, cells that are attracted to the magnet are retained; for negative selection, cells that are not attracted (unlabeled cells) are retained. In some aspects, a combination of positive and negative selection is performed during the same selection step, where the positive and negative fractions are retained and further processed or subject to further separation steps.

[0417] In certain embodiments, the magnetically responsive particles are coated in primary antibodies or other binding partners, secondary antibodies, lectins, enzymes, or streptavidin. In certain embodiments, the magnetic particles are attached to cells via a coating of primary antibodies specific for one or more markers. In certain embodiments, the cells, rather than the beads, are labeled with a primary antibody or binding partner, and then cell-type specific secondary antibody- or other binding partner (e.g., streptavidin)-coated magnetic particles, are added. In certain embodiments, streptavidin-coated magnetic particles are used in conjunction with biotinylated primary or secondary antibodies.

[0418] In some embodiments, the magnetically responsive particles are left attached to the cells that are to be subsequently incubated, cultured and/or engineered; in some aspects, the particles are left attached to the cells for administration to a patient. In some embodiments, the magnetizable or magnetically responsive particles are removed from the cells. Methods for removing magnetizable particles from cells are known and include, e.g., the use of competing non-labeled antibodies, and magnetizable particles or antibodies conjugated to cleavable linkers. In some embodiments, the magnetizable particles are biodegradable.

[0419] In some embodiments, the affinity-based selection is via magnetic-activated cell sorting (MACS) (Miltenyi Biotec, Auburn, Calif.). Magnetic Activated Cell Sorting (MACS) systems are capable of high-purity selection of cells having magnetized particles attached thereto. In certain embodiments, MACS operates in a mode wherein the non-target and target species are sequentially eluted after the application of the external magnetic field. That is, the cells attached to magnetized particles are held in place while the unattached species are eluted. Then, after this first elution step is completed, the species that were trapped in the magnetic field and were prevented from being eluted are freed in some manner such that they can be eluted and recovered. In certain embodiments, the non-target cells are labelled and depleted from the heterogeneous population of cells.

[0420] In certain embodiments, the isolation or separation is carried out using a system, device, or apparatus that carries out one or more of the isolation, cell preparation, separation, processing, incubation, culture, and/or formulation steps of the methods. In some aspects, the system is used to carry out each of these steps in a closed or sterile environment, for example, to minimize error, user handling and/or contamination. In one example, the system is a system as described in International Patent Application, Publication Number WO2009/072003, or US 20110003380 A1.

[0421] In some embodiments, the system or apparatus carries out one or more, e.g., all, of the isolation, processing, engineering, and formulation steps in an integrated or self-contained system, and/or in an automated or programmable fashion. In some aspects, the system or apparatus includes a computer and/or computer program in communication with the system or apparatus, which allows a user to program, control, assess the outcome of, and/or adjust various aspects of the processing, isolation, engineering, and formulation steps.

[0422] In some aspects, the separation and/or other steps is carried out using CliniMACS system (Miltenyi Biotec), for example, for automated separation of cells on a clinical-scale level in a closed and sterile system. Components can include an integrated microcomputer, magnetic separation unit, peristaltic pump, and various pinch valves. The integrated computer in some aspects controls all components of the instrument and directs the system to perform repeated procedures in a standardized sequence. The magnetic separation unit in some aspects includes a movable permanent magnet and a holder for the selection column. The peristaltic pump controls the flow rate throughout the tubing set and, together with the pinch valves, ensures the controlled flow of buffer through the system and continual suspension of cells.

[0423] The CliniMACS system in some aspects uses antibody-coupled magnetizable particles that are supplied in a sterile, non-pyrogenic solution. In some embodiments, after labelling of cells with magnetic particles the cells are washed to remove excess particles. A cell preparation bag is then connected to the tubing set, which in turn is connected to a bag containing buffer and a cell collection bag. The tubing set consists of pre-assembled sterile tubing, including a pre-column and a separation column, and are for single use only. After initiation of the separation program, the system automatically applies the cell sample onto the separation column. Labelled cells are retained within the column, while unlabeled cells are removed by a series of washing steps. In some embodiments, the cell populations for use with the methods described herein are unlabeled and are not retained in the column. In some embodiments, the cell populations for use with the methods described herein are labeled and are retained in the column. In some embodiments, the cell populations for use with the methods described herein are eluted from the column after removal of the magnetic field, and are collected within the cell collection bag.

[0424] In certain embodiments, separation and/or other steps are carried out using the CliniMACS Prodigy system (Miltenyi Biotec). The CliniMACS Prodigy system in some aspects is equipped with a cell processing unity that permits automated washing and fractionation of cells by centrifugation. The CliniMACS Prodigy system can also include an onboard camera and image recognition software that determines the optimal cell fractionation endpoint by discerning the macroscopic layers of the source cell product. For example, peripheral blood is automatically separated into erythrocytes, white blood cells and plasma layers. The CliniMACS Prodigy system can also include an integrated cell cultivation chamber which accomplishes cell culture protocols such as, e.g., cell differentiation and expansion, antigen loading, and long-term cell culture. Input ports can allow for the sterile removal and replenishment of media and cells can be monitored using an integrated microscope. See, e.g., Klebanoff et al. (2012) J Immunother. 35(9): 651-660, Terakura et al. (2012) Blood.1:72-82, and Wang et al. (2012) J Immunother. 35(9):689-701.

[0425] In some embodiments, a cell population described herein is collected and enriched (or depleted) via flow cytometry, in which cells stained for multiple cell surface markers are carried in a fluidic stream. In some embodiments, a cell population described herein is collected and enriched (or depleted) via preparative scale (FACS)-sorting. In certain embodiments, a cell population described herein is collected and enriched (or depleted) by use of microelectromechanical systems (MEMS) chips in combination with a FACS-based detection system (see, e.g., WO 2010/033140, Cho et al. (2010) Lab Chip 10, 1567-1573; and Godin et al. (2008) J Biophoton. 1(5):355-376. In both cases, cells can be labeled with multiple markers, allowing for the isolation of well-defined T cell subsets at high purity.

[0426] In some embodiments, the antibodies or binding partners are labeled with one or more detectable marker, to facilitate separation for positive and/or negative selection. For example, separation may be based on binding to fluorescently labeled antibodies. In some examples, separation of cells based on binding of antibodies or other binding partners specific for one or more cell surface markers are carried in a fluidic stream, such as by fluorescence-activated cell sorting (FACS), including preparative scale (FACS) and/or microelectromechanical systems (MEMS) chips, e.g., in combination with a flow-cytometric detection system. Such methods allow for positive and negative selection based on multiple markers simultaneously.

[0427] In some embodiments, the preparation methods include steps for freezing, e.g., cryopreserving, the cells, either before or after isolation, incubation, and/or engineering. In some embodiments, the freeze and subsequent thaw step removes granulocytes and, to some extent, monocytes in the cell population. In some embodiments, the cells are suspended in a freezing solution, e.g., following a washing step to remove plasma and platelets. Any of a variety of known freezing solutions and parameters in some aspects may be used. One example involves using PBS containing 20% DMSO and 8% human serum albumin (HSA), or other suitable cell freezing media. This is then diluted 1:1 with media so that the final concentration of DMSO and HSA are 10% and 4%, respectively. The cells are generally then frozen to −80° C. at a rate of 1° per minute and stored in the vapor phase of a liquid nitrogen storage tank.

[0428] In some embodiments, the cells are incubated and/or cultured prior to or in connection with genetic engineering. The incubation steps can include culture, cultivation, stimulation, activation, and/or propagation. The incubation and/or engineering may be carried out in a culture vessel, such as a unit, chamber, well, column, tube, tubing set, valve, vial, culture dish, bag, or other container for culture or cultivating cells. In some embodiments, the compositions or cells are incubated in the presence of stimulating conditions or a stimulatory agent. Such conditions include those designed to induce proliferation, expansion, activation, and/or survival of cells in the population, to mimic antigen exposure, and/or to prime the cells for genetic engineering, such as for the introduction of a recombinant antigen receptor.

[0429] The conditions can include one or more of particular media, temperature, oxygen content, carbon dioxide content, time, agents, e.g., nutrients, amino acids, antibiotics, ions, and/or stimulatory factors, such as cytokines, chemokines, antigens, binding partners, fusion proteins, recombinant soluble receptors, and any other agents designed to activate the cells.

[0430] In some embodiments, the stimulating conditions or agents include one or more agent, e.g., ligand, which is capable of activating an intracellular signaling domain of a TCR complex. In some aspects, the agent turns on or initiates TCR/CD3 intracellular signaling cascade in a T cell. Such agents can include antibodies, such as those specific for a TCR, e.g. anti-CD3. In some embodiments, the stimulating conditions include one or more agent, e.g. ligand, which is capable of stimulating a costimulatory receptor, e.g., anti-CD28. In some embodiments, such agents and/or ligands may be, bound to solid support such as a bead, and/or one or more cytokines. Optionally, the expansion method may further comprise the step of adding anti-CD3 and/or anti-CD28 antibody to the culture medium (e.g., at a concentration of at least about 0.5 ng/ml). In some embodiments, the stimulating agents include IL-2, IL-15 and/or IL-7. In some aspects, the IL-2 concentration is at least about 10 units/mL.

[0431] In some aspects, incubation is carried out in accordance with techniques such as those described in U.S. Pat. No. 6,040,177 to Riddell et al., Klebanoff et al.(2012) J Immunother. 35(9): 651-660, Terakura et al. (2012) Blood.1:72-82, and/or Wang et al. (2012) J Immunother. 35(9):689-701.

[0432] In some embodiments, the T cells are expanded by adding to a culture-initiating composition feeder cells, such as non-dividing peripheral blood mononuclear cells (PBMC), (e.g., such that the resulting population of cells contains at least about 5, 10, 20, or 40 or more PBMC feeder cells for each T lymphocyte in the initial population to be expanded); and incubating the culture (e.g. for a time sufficient to expand the numbers of T cells). In some aspects, the non-dividing feeder cells can comprise gamma-irradiated PBMC feeder cells. In some embodiments, the PBMC are irradiated with gamma rays in the range of about 3000 to 3600 rads to prevent cell division. In some aspects, the feeder cells are added to culture medium prior to the addition of the populations of T cells.

[0433] In some embodiments, the stimulating conditions include temperature suitable for the growth of human T lymphocytes, for example, at least about 25 degrees Celsius, generally at least about 30 degrees, and generally at or about 37 degrees Celsius. Optionally, the incubation may further comprise adding non-dividing EBV-transformed lymphoblastoid cells (LCL) as feeder cells. LCL can be irradiated with gamma rays in the range of about 6000 to 10,000 rads. The LCL feeder cells in some aspects is provided in any suitable amount, such as a ratio of LCL feeder cells to initial T lymphocytes of at least about 10:1.

[0434] In embodiments, antigen-specific T cells, such as antigen-specific CD4+ and/or CD8+ T cells, are obtained by stimulating naive or antigen specific T lymphocytes with antigen. For example, antigen-specific T cell lines or clones can be generated to cytomegalovirus antigens by isolating T cells from infected subjects and stimulating the cells in vitro with the same antigen.

### III. COMPOSITIONS, FORMULATIONS, AND METHODS OF ADMINISTRATION

[0435] Provided herein are methods of administering a therapy, e.g., a cell therapy and/or an immunotherapy, to a subject. In some embodiments, the subjects risk, likelihood, and/or probability of experiencing a toxicity following administration of and/or associated with the therapy has been assessed, determined, and/or measured by one or more methods described in Section-I. In particular embodiments, the subject has been determined to have a low, reduced, and/or decreased risk, probability, or likelihood of experiencing toxicity following administration of and/or associated with the therapy and the subject is administered a standard dose or standard doses of the therapy. In certain embodiments, the subject has been determined to have a high, increased, and/or elevated risk, probability, or likelihood of experiencing toxicity following administration of and/or associated with the therapy, and the subject is administered a reduced dose of the therapy and/or an intervention to prevent or reduce toxicity, e.g., an intervention as described in Section IV. In certain embodiments, the subject is determined to have a high, increased, and/or elevated risk, probability and/or likelihood of developing toxicity following administration of the therapy and the subject is not administered the therapy and is instead administered an alternative therapy. In certain embodiments, the T cell therapy contains one or more cells that express a recombinant receptor, e.g., a CAR.

[0436] In some embodiments, the subject is determined to have a low risk, probability, and/or likelihood of developing a toxicity, e.g., a severe neurotoxicity, to a therapy, by one or more methods provided in Section I. In certain embodiments, the subject is determined to have a low risk, probability, and/or likelihood of developing a toxicity following administration of a cell therapy and/or an immunotherapy. In particular embodiments, the expression of one or more genes in a sample is assessed, measured, detected, and/or quantified in a sample taken and/or obtained from the subject, and the subject is determined to have a low risk, probability, and/or likelihood of developing a toxicity, e.g., a severe neurotoxicity, to the cell therapy. In certain embodiments, the therapy is a treatment with a cell therapy that includes CAR expressing cells. In certain embodiments, the subject is determined to have a risk, probability, and/or likelihood of developing a toxicity following administration of a therapy of at or below 50%, at or below 45%, at or below 40%, at or below 35%, at or below 30%, at or below 25%, at or below 20%, at or below 15%, at or below 10%, at or below 5%, at or below 4%, at or below 3%, at or below 2%, at or below 1%, at or below 0.1%, at or below 0.05%, at or below 0.01%, at or below 0.005%, at or below 0.001%, at or below 0.0001%, at or below 0.00001%, or at or below 0.000001%. In certain embodiments, the subject is determined to have a low risk, probability, and/or likelihood of developing a toxicity following administration of a therapy, and the therapy is administered to the subject at a standard dose.

[0437] In some embodiments, the subject is determined to have a high risk, probability, and/or likelihood of developing a toxicity, e.g., a severe neurotoxicity, to a therapy. In certain embodiments, the subject is determined to have a high risk, probability, and/or likelihood of developing a toxicity following administration of a therapy. In particular embodiments, the expression of one or more genes in a sample is assessed, measured, detected, and/or quantified in a sample taken and/or obtained from the subject, and the subject is determined to have a high risk, probability, and/or likelihood of developing a toxicity, e.g., a severe neurotoxicity, to the cell therapy. In certain embodiments, the therapy is a treatment with a therapy containing CAR expressing cells. In certain embodiments, the subject is determined to have a risk, probability, and/or likelihood of developing a toxicity following administration of a therapy is at least a at least a 5%, at least a 10%, at least a 15%, at least a 20%, at least a 25%, at least a 30%, at least a 40%, at least a 45%, at least a 50%, at least a 55%, at least a 60%, at least a 65%, at least a 70%, at least a 75%, at least a 80%, at least a 85%, at least a 90%, at least a 95%, at least a 97%, at least a 98%, at least a 99%, or about a 100% risk, probability or likelihood that a toxicity will occur in the subject, e.g., during or after the course of a therapy, such as a cell therapy. In certain embodiments, the subject is determined to have a high risk, probability, and/or likelihood of developing a toxicity following administration of a therapy, and the therapy is not administered to the subject at the standard dose. In some embodiments, the subject is determined to have a high risk, probability, and/or likelihood of developing a toxicity following administration of a therapy, and an alternative treatment is administered to the subject. In some embodiments, the alternative therapy is not a cell therapy. In particular embodiments, the alternative therapy is not a T-cell engaging therapy.

[0438] A. Measuring a Parameter of Activity in Cells of the Therapy

[0439] In certain embodiments, the activity of one or more cells of a cell therapy is measured or assessed by measuring, detecting, quantifying, and/or assessing a parameter, e.g., a phenotype or a characteristic, of the one or more cells. In certain embodiments, cells with a high activity and/or an increased or elevated activity are not administered to a subject that is determined to be at an elevated, increased, or high risk of toxicity following administration of the therapy by any of the methods described in Section I. In particular embodiments, a reduced dose, e.g., lower than a standard dose, of cells with a high activity and/or an increased or elevated activity are administered to a subject that is determined to be at an elevated, increased, or high risk of toxicity following administration of the cell therapy by any of the methods described in Section I.

[0440] In some embodiments, the subject is determined at a high, elevated, and/or increased risk of a toxicity following administration of a cell therapy by one or more methods provided in Section-I. In some embodiments, if the parameter of the cell composition indicates a high, elevated, and/or increased activity, then the therapeutic cell composition is not administered to the subject with the high, elevated, and/or increased risk, or is administered at a reduced dose, e.g., less than the dose. In certain embodiments, if the parameter of the cell composition does not indicate a high, elevated, and/or increased activity, then the therapeutic cell composition is administered to the subject at the standard dose.

[0441] In some embodiments, the parameter is assessed by a response to a stimulus, for example a stimulus that stimulates triggers, induces, stimulates, or prolongs an immune cell function. In certain embodiments, the cells are incubated in the presence of stimulating conditions or a stimulatory agent, the parameter is or includes the response to the stimulation. In particular embodiments, the parameter is or includes the production or secretion of a soluble factor in response to one or more stimulations. In some embodiments, the parameter is or includes a lack or production or secretion of a soluble factor in response to one or more stimulations. In certain embodiments, the soluble factor is a cytokine. In particular embodiments, the soluble factor is a proinflammatory cytokine.

[0442] The conditions can include one or more of particular media, temperature, oxygen content, carbon dioxide content, time, agents, e.g., nutrients, amino acids, antibiotics, ions, and/or stimulatory factors, such as cytokines, chemokines, antigens, binding partners, fusion proteins, recombinant soluble receptors, and any other agents designed to activate the cells. In some embodiments, the cells are stimulated and the parameter is determined by whether or not a soluble factor, e.g., a proinflammatory cytokine, is produced or secreted. In some embodiments, the stimulation is nonspecific, i.e., is not an antigen-specific stimulation. In some embodiments, cells are incubated in the presence of stimulating conditions or a stimulatory agent for about 1 hour, about 2 hours, about 3 hours, about 4 hours, about 5 hours, about 6 hours, about 7 hours, about 8 hours, about 9 hours, about 10 hours, about 11 hours, about 12 hours, about 18 hours, about 24 hours, about 48 hours, or for a duration of time between 1 hour and 4 hours, between 1 hour and 12 hours, between 12 hours and 24 hours, or for more than 24 hours.

[0443] In certain embodiments, the therapeutic cell composition contains cells that express a recombinant receptor, e.g., a CAR. In some embodiments, the cells of the composition are stimulated with an agent that is an antigen or an epitope thereof that is specific to the recombinant receptor, or is an antibody or fragment thereof that binds to and/or recognizes the recombinant receptor, or a combination thereof. Thus, in some embodiments, the measurement of the parameter is a measure of recombinant receptor-dependent activity. In some embodiments, the recombinant receptor is a CAR, and the agent is an antigen or an epitope thereof that is specific to the CAR, or is an antibody or fragment thereof that binds to and/or recognizes the CAR, or a combination thereof. In particular embodiments, the cells are stimulated by incubating the cells in the presence of target cells with surface expression of the antigen that is recognized by the CAR. In certain embodiments, the recombinant receptor is a CAR, and the agent is an antibody or an active fragment, variant, or portion thereof that binds to the CAR. In certain embodiments, the antibody or the active fragment, variant, or portion thereof that binds to the CAR is an anti-idiotypic (anti-ID) antibody.

[0444] In particular embodiments, the parameter is or includes the production or secretion of a proinflammatory cytokine in response to one or more of stimulations. The production and/or the secretion of cytokines contributes to immune responses, and is involved in different processes including the induction of anti-viral proteins and the induction of T cell proliferation. Cytokines are not pre-formed factors but are rapidly produced and secreted in response to cellular activation. The production or secretion of cytokines may be measured, detected, and/or quantified by any suitable known technique.

[0445] In some embodiments, the parameter is or includes the production of a proinflammatory cytokine. In certain embodiments, the parameter is or includes the production of more than one proinflammatory cytokine. In certain embodiments, the parameter is or includes the production, or lack thereof, of one or more of IL-2, IL-13, IFN-gamma, or TNF-alpha. In some embodiments, the parameter is the presence of a production, and/or the presence of a high level of production of the cytokine. In some embodiments, the parameter is a low, reduced, or absent production of a cytokine. In some embodiments, the proinflammatory cytokine is TNF-alpha.

[0446] In some embodiments, a measurement of the parameter is the amount of a proinflammatory cytokine that was released by cells of the cell composition. In some embodiments, the measurement of the parameter is a concentration of extracellular proinflammatory cytokine, e.g., TNF-alpha, that is released by cells of the cell composition. In certain embodiment, the measurement of the parameter is normalized to the number of cells examined. In some embodiments, the measurement of the parameter is normalized to the amount of time the cells were incubated under the stimulatory conditions. In particular embodiments, the measurement is normalized to the volume of the media where the cells were incubated.

[0447] In some embodiments, the measurement of the parameter is compared to a threshold or reference value of the parameter, e.g., a threshold value. In particular embodiments, the cells of the therapeutic cell composition are determined to have a high activity of the measurement of the parameter is above the threshold value. In some embodiments, the threshold value is a boundary between or a threshold value that separates the values of the parameter that are associated with a risk of toxicity and/or where all or a majority of toxicities take place or have previously taken place from values of the parameter associated with low risk of toxicity and or where a minority of the toxicities take place or previously taken place.

[0448] In some embodiments, the threshold value is a predetermined value. In particular embodiments, the threshold value has been calculated and/or derived from data from a study. In some embodiments, the study is a clinical study. In particular embodiments, the clinical study is a completed clinical study. In certain embodiments, the data from the study included measurements of the parameter from therapeutic cell compositions that were administered to subjects in the study. In particular embodiments, the data from the study includes the number of instances and the degree of severity of toxicities experienced by subjects who were administered the therapeutic cell compositions. In certain embodiments, the subjects in the clinical study had or have a disease or condition. In some embodiments, the disease or condition is cancer. In some embodiments, the cancer is ALL. In certain embodiments, the therapeutic cell compositions contained cells that expressed recombinant receptors. In particular embodiments, the recombinant receptor was a CAR.

[0449] In particular embodiments, the measurement of the parameter is compared to a threshold value that was calculated and/or derived from a study that included the same or similar therapeutic cell compositions. In particular embodiments, the parameter was measured in cells of the therapeutic cell composition that express the same recombinant receptor or CAR as the cell compositions administered in the clinical study.

[0450] In certain embodiments, the measurement of the parameter is compared to the threshold value. In some embodiments, the measurement of the parameter is a measure of recombinant receptor activity, e.g., CAR dependent activity. In certain embodiments, when the measurement of the parameter is greater than the reference value, then the cell composition is determined and/or considered to have a high/elevated, and/or increased cell activity. In some embodiments, when the measurement of the parameter is less than the reference value, then the cell composition is determined and/or considered to not to have a high/elevated, and/or increased cell activity. In some embodiments, when the measurement of the parameter is less than the reference value, then the cell composition is determined and/or considered to have a low, reduced and/or decreased cell activity.

[0451] In certain embodiments, the threshold value is determined from a measurement of the plurality of compositions, e.g., reference compositions, comprising T cells expressing the recombinant receptor, e.g., a CAR, that were derived from and administered to subjects of a group of subjects that went on to develop toxicity. In some embodiments, the toxicity was severe neurotoxicity, e.g., grade 3 or higher, prolonged grade 3 or higher, grade 4 or 5, or grade 5 neurotoxicity. In some embodiments, the threshold value is within 50%, within 40%, within 30%, within 25%, within 20%, within 15%, within 10%, or within 5% below the average measure of the parameter, e.g., recombinant receptor dependent activity, and/or is within 3, 2.5, 2, 1.5, 1.0, 0.75, 0.5, or 0.25 standard deviations below the average measure in the plurality of reference compositions. In some embodiments, the threshold value is below the lowest measure of the parameter, e.g., recombinant receptor-dependent activity, in a composition from among the plurality of reference compositions. In certain embodiments, the threshold value is within 50%, within 25%, within 20%, within 15%, within 10%, or within 5% below the lowest measure, in a composition from among the plurality of reference compositions. In particular embodiments, the threshold value is below the measure of the parameter, e.g., the recombinant receptor-dependent activity, among more than 75%, 80%, 85%, 90%, 95%, or 98% of samples from among a plurality of reference composition.

[0452] In some embodiments, the gene signature, e.g., the expression of one or more genes associated with and/or correlated to toxicity following administration of a cell therapy, e.g., genes listed in Table 1, Table 2, Table 3, Table E2A, Table E2B, or Table E4 (e.g. a subset of these genes in the relevant Table which as a recited SEQ ID NO, and/or a Uniprot ID), of a sample obtained from a subject indicates that the subject has or is likely to have a high, elevated, and/or increased risk of toxicity following administration of a therapeutic cell composition, and a parameter of the therapeutic cell composition is assessed, measured, and/or quantified. In some embodiments, the parameter is related to cell activity. In particular embodiments, the parameter is the release of TNF-alpha by stimulation of a recombinant receptor or CAR that is expressed by cells in the therapeutic cell composition. In some embodiments, measurement of the parameter is compared to a threshold value. In particular embodiments, if the measurement is greater than the threshold value then the therapeutic cell composition is determined to have a high, elevated, and/or increased activity. In some embodiments, if the measurement is less than the threshold value, then the therapeutic cell composition is determined to not to have a high, elevated, and/or increased activity. In particular embodiments, a therapeutic cell composition that is determined to have a high, elevated, and/or increased activity is not administered to the subject at the standard dose. In certain embodiments, a therapeutic cell composition that is determined to not have a high, elevated, and/or increased activity is administered to the subject at the standard dose.

[0453] In some embodiments, methods are provided herein to administer a therapeutic cell composition to a subject in need thereof, whereby a dose is administered to subjects with low risk and an alternative doses are administered to subjects with high risk.

[0454] B. Administration of a Cell Therapy

[0455] Provided herein are methods of administering a cell therapy, such as methods of selecting a subject and administering a dose of cell therapy, wherein the subject is selected based on the risk, probability, and/or likelihood of toxicity. In certain embodiments, the methods include steps to assess, determine, measure, and/or quantify a risk, probability, and/or likelihood that a subject will experience and/or develop a toxicity following administration of or associated with a cell therapy. In some embodiments, the subject's risk, probability, and/or likelihood of experiencing or developing the toxicity is assessed, determined, measured and/or quantified by a method described in Section-I. In particular embodiments, the subject is determined to have a low, reduced, and/or decreased risk, probability and/or likelihood of toxicity, and the subject is administered a standard dose of a cell therapy. In certain embodiments, the subject is determined to have a high, elevated, or increased risk of toxicity, and the subject is administered a dose of a cell therapy that is less than a standard dose of the cell therapy. In particular embodiments, the subject is determined to have a high, elevated, or increased risk of toxicity, and the subject is administered a standard dose of a cell therapy and an intervention that is provided in Section IV. In certain embodiments, the subject is determined to have a high, elevated, or increased risk of toxicity, and the subject is administered a dose of a cell therapy that is lower than the standard dose of the cell therapy and an intervention that is provided in Section IV.

[0456] 1. Methods of Treatment

[0457] Also provided are methods of using and uses of the cells and compositions, such as those present in an output composition described herein, in the treatment of diseases, conditions, and disorders in which the antigen recognized by the recombinant receptor (e.g. CAR) is expressed. In certain embodiments of the methods provided herein, the subject is administered a standard dose of a therapy, e.g., an immunotherapy or a cell therapy. In certain embodiments, the risk, probability, and/or likelihood that the subject will experience and/or develop a toxicity following administration of or associated with the cell therapy is determined by one or more methods provided in Section-I. In certain embodiments, the subject is determined to be unlikely, or to have a low risk, probability, and/or likelihood, of developing a toxicity, e.g., a neurotoxicity and/or a severe neurotoxicity, by performing one or more methods described in Section I, and the subject is administered a standard dose of the cell therapy. In particular embodiments, the subject is administered a reduced dose of the therapeutic cell composition. In some embodiments, the subject is determined to have a high, elevated, and/or an increased risk, probability, and/or likelihood of developing a toxicity, e.g., a neurotoxicity, and the subject is administered a reduced dose of the therapeutic cell composition. In some embodiments, the cell therapy is a T cell therapy. In some embodiments, the T cell therapy contains cells that express a recombinant receptor. In some embodiments, the recombinant receptor is a CAR.

[0458] The provided methods and uses include methods and uses for adoptive cell therapy. Provided are methods of administering the engineered cells and compositions, and uses of such engineered cells and compositions to treat or prevent diseases, conditions, and disorders, including cancers. The disease or condition that is treated in some aspects can be any in which expression of an antigen is associated with, specific to, and/or expressed on a cell or tissue of a disease, disorder or condition and/or involved in the etiology of a disease, condition or disorder, e.g. causes, exacerbates or otherwise is involved in such disease, condition, or disorder. In some embodiments, the methods include administration of the engineered cells or a composition containing the cells, such as cells from an output composition as described, to a subject, tissue, or cell, such as one having, at risk for, or suspected of having the disease, condition or disorder. In some embodiments, the cells, populations, and compositions are administered to a subject having the particular disease or condition to be treated, e.g., via adoptive cell therapy, such as adoptive T cell therapy. In some embodiments, the cells or compositions are administered to the subject, such as a subject having or at risk for the disease or condition, ameliorate one or more symptom of the disease or condition, such as by lessening tumor burden in a cancer expressing an antigen recognized by an engineered T cell.

[0459] The disease or condition that is treated in some aspects can be any in which expression of an antigen is associated with, specific to, and/or expressed on a cell or tissue of a disease, disorder or condition and/or involved in the etiology of a disease, condition or disorder, e.g. causes, exacerbates or otherwise is involved in such disease, condition, or disorder. Exemplary diseases and conditions can include diseases or conditions associated with malignancy or transformation of cells (e.g. cancer), autoimmune or inflammatory disease, or an infectious disease, e.g. caused by a bacterial, viral or other pathogen.

[0460] Exemplary antigens, which include antigens associated with various diseases and conditions that can be treated, are described above. In particular embodiments, the immunomodulatory polypeptide and/or recombinant receptor, e.g., the chimeric antigen receptor or TCR, specifically binds to an antigen associated with the disease or condition. In some embodiments, the subject has a disease, disorder or condition, optionally a cancer, a tumor, an autoimmune disease, disorder or condition, or an infectious disease.

[0461] In some embodiments, the disease, disorder or condition includes tumors associated with various cancers. The cancer can in some embodiments be any cancer located in the body of a subject, such as, but not limited to, cancers located at the head and neck, breast, liver, colon, ovary, prostate, pancreas, brain, cervix, bone, skin, eye, bladder, stomach, esophagus, peritoneum, or lung. For example, the anti-cancer agent can be used for the treatment of colon cancer, cervical cancer, cancer of the central nervous system, breast cancer, bladder cancer, anal carcinoma, head and neck cancer, ovarian cancer, endometrial cancer, small cell lung cancer, non-small cell lung carcinoma, neuroendocrine cancer, soft tissue carcinoma, penile cancer, prostate cancer, pancreatic cancer, gastric cancer, gall bladder cancer or espohageal cancer. In some cases, the cancer can be a cancer of the blood. In some embodiments, the disease, disorder or condition is a tumor, such as a solid tumor, lymphoma, leukemia, blood tumor, metastatic tumor, or other cancer or tumor type. In some embodiments, the disease, disorder or condition is selected from among cancers of the colon, lung, liver, breast, prostate, ovarian, skin, melanoma, bone, brain cancer, ovarian cancer, epithelial cancers, renal cell carcinoma, pancreatic adenocarcinoma, cervical carcinoma, colorectal cancer, glioblastoma, neuroblastoma, Ewing sarcoma, medulloblastoma, osteosarcoma, synovial sarcoma, and/or mesothelioma.

[0462] Among the diseases, conditions, and disorders are tumors, including solid tumors, hematologic malignancies, and melanomas, and including localized and metastatic tumors, infectious diseases, such as infection with a virus or other pathogen, e.g., HIV, HCV, HBV, CMV, HPV, and parasitic disease, and autoimmune and inflammatory diseases. In some embodiments, the disease, disorder or condition is a tumor, cancer, malignancy, neoplasm, or other proliferative disease or disorder. Such diseases include but are not limited to leukemia, lymphoma, e.g., acute myeloid (or myelogenous) leukemia (AML), chronic myeloid (or myelogenous) leukemia (CML), acute lymphocytic (or lymphoblastic) leukemia (ALL), chronic lymphocytic leukemia (CLL), hairy cell leukemia (HCL), small lymphocytic lymphoma (SLL), Mantle cell lymphoma (MCL), Marginal zone lymphoma, Burkitt lymphoma, Hodgkin lymphoma (HL), non-Hodgkin lymphoma (NHL), Anaplastic large cell lymphoma (ALCL), follicular lymphoma, refractory follicular lymphoma,diffuse large B-cell lymphoma (DLBCL) and multiple myeloma (MM), a B cell malignancy is selected from among acute lymphoblastic leukemia (ALL), adult ALL, chronic lymphoblastic leukemia (CLL), non-Hodgkin lymphoma (NHL), and Diffuse Large B-Cell Lymphoma (DLBCL).

[0463] In some embodiments, the disease or condition is an infectious disease or condition, such as, but not limited to, viral, retroviral, bacterial, and protozoal infections, immunodeficiency, Cytomegalovirus (CMV), Epstein-Barr virus (EBV), adenovirus, BK polyomavirus. In some embodiments, the disease or condition is an autoimmune or inflammatory disease or condition, such as arthritis, e.g., rheumatoid arthritis (RA), Type I diabetes, systemic lupus erythematosus (SLE), inflammatory bowel disease, psoriasis, scleroderma, autoimmune thyroid disease, Grave's disease, Crohn's disease, multiple sclerosis, asthma, and/or a disease or condition associated with transplant.

[0464] In some embodiments, the antigen or ligand is a tumor antigen or cancer marker. In some embodiments, the antigen or ligand the antigen is or includes αvβ6 integrin (αvβ6 integrin), B cell maturation antigen (BCMA), B7-H3, B7-H6, carbonic anhydrase 9 (CA9, also known as CAIX or G250), a cancer-testis antigen, cancer/testis antigen 1B (CTAG, also known as NY-ESO-1 and LAGE-2), carcinoembryonic antigen (CEA), a cyclin, cyclin A2, C-C Motif Chemokine Ligand 1 (CCL-1), CD19, CD20, CD22, CD23, CD24, CD30, CD33, CD38, CD44, CD44v6, CD44v7/8, CD123, CD133, CD138, CD171, chondroitin sulfate proteoglycan 4 (CSPG4), epidermal growth factor protein (EGFR), type III epidermal growth factor receptor mutation (EGFR vIII), epithelial glycoprotein 2 (EPG-2), epithelial glycoprotein 40 (EPG-40), ephrinB2, ephrine receptor A2 (EPHa2), estrogen receptor, Fc receptor like 5 (FCRL5; also known as Fc receptor homolog 5 or FCRH5), fetal acetylcholine receptor (fetal AchR), a folate binding protein (FBP), folate receptor alpha, ganglioside GD2, O-acetylated GD2 (OGD2), ganglioside GD3, glycoprotein 100 (gp100), glypican-3 (GPC3), G Protein Coupled Receptor 5D (GPCR5D), Her2/neu (receptor tyrosine kinase erb-B2), Her3 (erb-B3), Her4 (erb-B4), erbB dimers, Human high molecular weight-melanoma-associated antigen (HMW-MAA), hepatitis B surface antigen, Human leukocyte antigen Al (HLA-A1), Human leukocyte antigen A2 (HLA-A2), IL-22 receptor alpha(IL-22Rα), IL-13 receptor alpha 2 (IL-13Rα2), kinase insert domain receptor (kdr), kappa light chain, L1 cell adhesion molecule (L1-CAM), CE7 epitope of L1-CAM, Leucine Rich Repeat Containing 8 Family Member A (LRRC8A), Lewis Y, Melanoma-associated antigen (MAGE)-A1, MAGE-A3, MAGE-A6, MAGE-A10, mesothelin (MSLN), c-Met, murine cytomegalovirus (CMV), mucin 1 (MUC1), MUC16, natural killer group 2 member D (NKG2D) ligands, melan A (MART-1), neural cell adhesion molecule (NCAM), oncofetal antigen, Preferentially expressed antigen of melanoma (PRAME), progesterone receptor, a prostate specific antigen, prostate stem cell antigen (PSCA), prostate specific membrane antigen (PSMA), Receptor Tyrosine Kinase Like Orphan Receptor 1 (ROR1), survivin, Trophoblast glycoprotein (TPBG also known as 5T4), tumor-associated glycoprotein 72 (TAG72), Tyrosinase related protein 1 (TRP1, also known as TYRP1 or gp75), Tyrosinase related protein 2 (TRP2, also known as dopachrome tautomerase, dopachrome delta-isomerase or DCT), vascular endothelial growth factor receptor (VEGFR), vascular endothelial growth factor receptor 2 (VEGFR2), Wilms Tumor 1 (WT-1), a pathogen-specific or pathogen-expressed antigen, or an antigen associated with a universal tag, and/or biotinylated molecules, and/or molecules expressed by HIV, HCV, HBV or other pathogens.

[0465] In some embodiments, the disease or condition is a B cell malignancy. In some embodiments, the B cell malignancy is a leukemia or a lymphoma. In some aspects, the disease or condition is acute lymphoblastic leukemia (ALL), adult ALL, chronic lymphoblastic leukemia (CLL), non-Hodgkin lymphoma (NHL), or Diffuse Large B-Cell Lymphoma (DLBCL). In some cases, the disease or condition is an NHL, such as or including an NHL that is an aggressive NHL, diffuse large B cell lymphoma (DLBCL), NOS (de novo and transformed from indolent), primary mediastinal large B cell lymphoma (PMBCL), T cell/histocyte-rich large B cell lymphoma (TCHRBCL), Burkitt's lymphoma, mantle cell lymphoma (MCL), and/or follicular lymphoma (FL), optionally, follicular lymphoma Grade 3B (FL3B). In some aspects, the recombinant receptor, such as a CAR, specifically binds to an antigen associated with the disease or condition or expressed in cells of the environment of a lesion associated with the B cell malignancy. Antigens targeted by the receptors in some embodiments include antigens associated with a B cell malignancy, such as any of a number of known B cell marker. In some embodiments, the antigen targeted by the receptor is CD20, CD19, CD22, ROR1, CD45, CD21, CD5, CD33, Igkappa, Iglambda, CD79a, CD79b or CD30.

[0466] In some embodiments, the disease or condition is acute lymphoblastic leukemia (ALL). In some embodiments, the disease or condition is adult ALL. In some of such aspects, the antigens targeted by the receptors are B cell antigens, such as one or more of CD19, CD20 or CD20. Chimeric antigen receptors for targeting such diseases are known, including any as described.

[0467] In particular embodiments, the immunomodulatory polypeptide and/or recombinant receptor, e.g., the chimeric antigen receptor or TCR, specifically binds to an antigen associated with the disease or condition. In some embodiments, the subject has a disease, disorder or condition, optionally a cancer, a tumor, an autoimmune disease, disorder or condition, or an infectious disease.

[0468] In certain embodiments, if the risk, probability, and/or likelihood that the subject will experience and/or develop a toxicity following administration of or associated with the cell therapy is determined to be high, increased, or elevated by one or more methods provided in Section-I, then the subject is administered the cell therapy in an in-patient setting and/or with admission to the hospital for one or more days, optionally wherein the cell therapy is otherwise to be administered to subjects on an outpatient basis or without admission to the hospital for one or more days if the risk, probability, and/or likelihood of is determined to be low, reduced, or decreased according to the results of a method provided in Section-I. In particular embodiments, a cell therapy, optionally at a non-reduced dose, optionally on an outpatient basis or without admission to the hospital for one or more days, is administered to the subject that is determined to have a low, decreased, and/or reduced risk of toxicity according to the results of a method provided in Section-I.

[0469] In certain embodiments, if the risk, probability, and/or likelihood that the subject will experience and/or develop a toxicity following administration of or associated with the cell therapy is determined to be high, increased, or elevated by one or more methods provided in Section-I, then the subject is administered a standard dose of the cell therapy in an in-patient setting and/or with admission to the hospital for one or more days. In particular embodiments, if the risk, probability, and/or likelihood that the subject will experience and/or develop a toxicity following administration of or associated with the cell therapy is determined to be high, increased, or elevated by one or more methods provided in Section-I, then the subject is administered a reduced dose of the cell therapy in an in-patient setting and/or with admission to the hospital for one or more days. In certain embodiments, if the risk, probability, and/or likelihood that the subject will experience and/or develop a toxicity following administration of or associated with the cell therapy is determined to be low, decreased, or reduced by one or more methods provided in Section-I, then the subject is administered a standard dose of the cell therapy on an outpatient basis or without admission to the hospital for one or more days.

[0470] In certain embodiments, if the risk, probability, and/or likelihood that the subject will experience and/or develop a toxicity following administration of and/or associated with the cell is determined to be high, increased, or elevated by one or more methods provided in Section-I, then the subject is not administered the cell therapy. In such embodiments, the subject may be administered an alternative therapy, such as a different cell therapy, or an immunotherapy.

[0471] In some embodiments, subjects with low, decreased, and/or reduced risk, probability, and/or likelihood to experience and/or develop a toxicity as determined by one or more methods provided in Section-I, are administered a standard dose of the cell therapy and at least 30%, at least 35%, at least 40%, at least 45%, at least 50%, at least 55%, at least 60%, at least 65%, at least 70%, at least 85%, at least 90%, at least 97%, at least 99%, or about 100% of the subjects do not develop or experience severe toxicity. In some embodiments, subjects with high, increased, or elevated risk, probability, and/or likelihood to experience and/or develop a toxicity as determined by one or more methods provided in Section-I, are administered a reduced dose of the cell therapy and at least 30%, at least 35%, at least 40%, at least 45%, at least 50%, at least 55%, at least 60%, at least 65%, at least 70%, at least 85%, at least 90%, at least 97%, at least 99%, or about 100% of the subjects do not develop or experience severe toxicity. In some embodiments, subjects with high, increased, or elevated risk, probability, and/or likelihood to experience and/or develop a toxicity as determined by one or more methods provided in Section-I, are administered a standard dose of the cell therapy and an intervention to prevent or reduce toxicity provided in Section IV, and at least 30%, at least 35%, at least 40%, at least 45%, at least 50%, at least 55%, at least 60%, at least 65%, at least 70%, at least 85%, at least 90%, at least 97%, at least 99%, or about 100% of the subjects do not develop or experience severe toxicity. In particular embodiments, subjects with high, increased, or elevated risk, probability, and/or likelihood to experience and/or develop a toxicity as determined by one or more methods provided in Section-I, are administered a reduced dose of the cell therapy and an intervention to prevent or reduce toxicity provided in Section IV, and at least 30%, at least 35%, at least 40%, at least 45%, at least 50%, at least 55%, at least 60%, at least 65%, at least 70%, at least 85%, at least 90%, at least 97%, at least 99%, or about 100% of the subjects do not develop or experience severe toxicity. In some embodiments, the severe toxicity is severe CRS of grade 3 or higher, grade 4 or higher, or grade 5. In some embodiments, the severe toxicity is severe neurotoxicity of grade 3 or higher, extended grade 3 or higher, grade 4 or higher, or grade 5.

[0472] In certain embodiments, a reduced dose of a therapeutic cell composition contains less than or equal to 90%, less than or equal to 80%, less than or equal to 70%, less than or equal to 60%, less than or equal to 50%, less than or equal to 40%, less than or equal to 30%, less than or equal to 20%, or less than or equal to 10%, or less than or equal to 1%, less than or equal to 0.1%, or less than or equal to 0.01% of the total amount of cells, CAR+cells, CAR+CD4+ cells, and/or CD8+CAR+ cells of a standard dose of the therapeutic cell composition. In some embodiments, a reduced dose of a therapeutic cell composition contains less than or equal to 90%, less than or equal to 80%, less than or equal to 70%, less than or equal to 60%, less than or equal to 50%, less than or equal to 40%, less than or equal to 30%, less than or equal to 20%, or less than or equal to 10%, or less than or equal to 1%, less than or equal to 0.1%, or less than or equal to 0.01% of the amount of CAR+cells of a standard dose of the therapeutic cell composition total amount of cells per kg of subject body weight, CAR+ cells per kg of subject body weight, CAR+CD4+ cells per kg of subject body weight, and/or CD8+CAR+ cells per kg of subject body weight.

[0473] In some embodiments, the methods include administration of the engineered cells or a composition containing the cells to a subject, tissue, or cell, such as one having, at risk for, or suspected of having the disease, condition or disorder. In some embodiments, the cells, populations, and compositions are administered to a subject having the particular disease or condition to be treated, e.g., via adoptive cell therapy, such as adoptive T cell therapy. In some embodiments, the cells or compositions are administered to the subject, such as a subject having or at risk for the disease or condition, ameliorate one or more symptom of the disease or condition.

[0474] In some embodiments, the cell-based therapy is or comprises administration of cells, such as T cells, that target a molecule expressed on the surface of a lesion, such as a tumor or a cancer. In some embodiments, the immune cells express a T cell receptor (TCR) or other antigen-binding receptor. In some embodiments, the immune cells express a recombinant receptor, such as a transgenic TCR or a chimeric antigen receptor (CAR). In some embodiments, the cells are autologous to the subject. In some embodiments, the cells are allogeneic to the subject.

[0475] Methods for administration of engineered cells for adoptive cell therapy are known and may be used in connection with the provided methods and compositions. For example, adoptive T cell therapy methods are described, e.g., in US Patent Application Publication No. 2003/0170238 to Gruenberg et al; U.S. Pat. No. 4,690,915 to Rosenberg; Rosenberg (2011) Nat Rev Clin Oncol. 8(10):577-85). See, e.g., Themeli et al., (2013) Nat Biotechnol. 31(10): 928-933; Tsukahara et al., (2013) Biochem Biophys Res Commun 438(1): 84-9; Davila et al., (2013) PLoS ONE 8(4): e61338.

[0476] In some embodiments, the cell therapy, e.g., adoptive T cell therapy, is carried out by autologous transfer, in which the cells are isolated and/or otherwise prepared from the subject who is to receive the cell therapy, or from a sample derived from such a subject. Thus, in some aspects, the cells are derived from a subject, e.g., patient, in need of a treatment and the cells, following isolation and processing are administered to the same subject.

[0477] In some embodiments, the cell therapy, e.g., adoptive T cell therapy, is carried out by allogeneic transfer, in which the cells are isolated and/or otherwise prepared from a subject other than a subject who is to receive or who ultimately receives the cell therapy, e.g., a first subject. In such embodiments, the cells then are administered to a different subject, e.g., a second subject, of the same species. In some embodiments, the first and second subjects are genetically identical. In some embodiments, the first and second subjects are genetically similar. In some embodiments, the second subject expresses the same HLA class or supertype as the first subject. The cells can be administered by any suitable means. Dosing and administration may depend in part on whether the administration is brief or chronic. Various dosing schedules include but are not limited to single or multiple administrations over various time-points, bolus administration, and pulse infusion.

[0478] The cells can be administered by any suitable means, for example, by bolus infusion, by injection, e.g., intravenous or subcutaneous injections, intraocular injection, periocular injection, subretinal injection, intravitreal injection, trans-septal injection, sub-scleral injection, intra-choroidal injection, intra-cameral injection, sub-conjunctival injection, sub-conjunctival injection, sub-Tenon's injection, retro-bulbar injection, peri-bulbar injection, or posterior juxtascleral delivery. In some embodiments, they are administered by parenteral, intrapulmonary, and intranasal, and, if desired for local treatment, intra-lesional administration. Parenteral infusions include intramuscular, intravenous, intraarterial, intraperitoneal, or subcutaneous administration. In some embodiments, a given dose is administered by a single bolus administration of the cells. In some embodiments, it is administered by multiple bolus administrations of the cells, for example, over a period of no more than 3 days, or by continuous infusion administration of the cells. In some embodiments, administration of the cell dose or any additional therapies, e.g., the lymphodepleting therapy, intervention therapy and/or combination therapy, is carried out via outpatient delivery.

[0479] In some embodiments, the methods comprise administration of a chemotherapeutic agent, e.g., a conditioning chemotherapeutic agent, for example, to reduce tumor burden prior to the administration.

[0480] Preconditioning subjects with immunodepleting (e.g., lymphodepleting) therapies in some aspects can improve the effects of adoptive cell therapy (ACT).

[0481] Thus, in some embodiments, the methods include administering a preconditioning agent, such as a lymphodepleting or chemotherapeutic agent, such as cyclophosphamide, fludarabine, or combinations thereof, to a subject prior to the initiation of the cell therapy. For example, the subject may be administered a preconditioning agent at least 2 days prior, such as at least 3, 4, 5, 6, or 7 days prior, to the initiation of the cell therapy. In some embodiments, the subject is administered a preconditioning agent no more than 7 days prior, such as no more than 6, 5, 4, 3, or 2 days prior, to the initiation of the cell therapy.

[0482] In some embodiments, the subject is preconditioned with cyclophosphamide at a dose between or between about 20 mg/kg and 100 mg/kg, such as between or between about 40 mg/kg and 80 mg/kg. In some aspects, the subject is preconditioned with or with about 60 mg/kg of cyclophosphamide. In some embodiments, the cyclophosphamide can be administered in a single dose or can be administered in a plurality of doses, such as given daily, every other day or every three days. In some embodiments, the cyclophosphamide is administered once daily for one or two days. In some embodiments, where the lymphodepleting agent comprises cyclophosphamide, the subject is administered cyclophosphamide at a dose between or between about 100 mg/m² and 500 mg/m², such as between or between about 200 mg/m² and 400 mg/m², or 250 mg/m² and 350 mg/m², inclusive. In some instances, the subject is administered about 300 mg/m² of cyclophosphamide. In some embodiments, the cyclophosphamide can be administered in a single dose or can be administered in a plurality of doses, such as given daily, every other day or every three days. In some embodiments, cyclophosphamide is administered daily, such as for 1-5 days, for example, for 3 to 5 days. In some instances, the subject is administered about 300 mg/m² of cyclophosphamide, daily for 3 days, prior to initiation of the cell therapy.

[0483] In some embodiments, where the lymphodepleting agent comprises fludarabine, the subject is administered fludarabine at a dose between or between about 1 mg/m² and 100 mg/m², such as between or between about 10 mg/m² and 75 mg/m², 15 mg/m² and 50 mg/m², 20 mg/m² and 40 mg/m², or 24 mg/m² and 35 mg/m², inclusive. In some instances, the subject is administered about 30 mg/m² of fludarabine. In some embodiments, the fludarabine can be administered in a single dose or can be administered in a plurality of doses, such as given daily, every other day or every three days. In some embodiments, fludarabine is administered daily, such as for 1-5 days, for example, for 3 to 5 days. In some instances, the subject is administered about 30 mg/m² of fludarabine, daily for 3 days, prior to initiation of the cell therapy.

[0484] In some embodiments, the lymphodepleting agent comprises a combination of agents, such as a combination of cyclophosphamide and fludarabine. Thus, the combination of agents may include cyclophosphamide at any dose or administration schedule, such as those described above, and fludarabine at any dose or administration schedule, such as those described above. For example, in some aspects, the subject is administered 60 mg/kg (−2 g/m²) of cyclophosphamide and 3 to 5 doses of 25 mg/m² fludarabine prior to the first or subsequent dose.

[0485] In some embodiments, the provided methods include one or more steps of administering to a subject cells of the output cell composition, such as a composition of cells described in Section I. In certain embodiments, the cells of the output cell composition include engineered CD4+ T cells and engineered CD8+ T cells. In some embodiments, the engineered CD4+ and CD8+ T cells express a T cell receptor (TCR) or other antigen-binding receptor. In some embodiments, the immune cells express a recombinant receptor, such as a transgenic TCR, a chimeric antigen receptor (CAR) or an antigen-binding fragment thereof. In some embodiments, the cells of the output cell composition are autologous to the subject. In some embodiments, the cells are allogeneic to the subject.

[0486] In certain embodiments, the CD4+ T cells and CD8+ T cells of the output cell composition are administered to the subject in the same composition, dose, or mixture. Thus, in some embodiments, the recombinant receptor expressing CD4+ T cells and recombinant receptor expressing CD8+ T cells, e.g., CAR+CD4+ and CAR+CD8+ are administered to the subject in the same composition, dose, or mixture.

[0487] 2 Dosing

[0488] In some embodiments, the cell therapy, such as CAR-T cell therapy, is administered to a subject in a therapeutically effective amount to treat the disease, such as in an amount to reduce disease burden. In some embodiments, the dose is a flat dose that is administered as a total number of cells, such as total recombinant receptor (e.g., CAR)-expressing cells, T cells, or peripheral blood mononuclear cells (PBMCs),In some embodiments, the dose is given as a number of cells per kg body weight of the subject. In some embodiments, the subject is a human. In some embodiments, the subject is an adult, such as an adult human subject. In some embodiments, the subject is a pediatric human subject.

[0489] In some embodiments, the standard dose of cells comprises between at or about 2×10⁵ of the cells/kg and at or about 2×10⁶ of the cells/kg, such as between at or about 4×10⁵ of the cells/kg and at or about 1×10⁶ of the cells/kg or between at or about 6×10⁵ of the cells/kg and at or about 8×10⁵ of the cells/kg. In some embodiments, the standard dose of cells comprises no more than 2×10⁵ of the cells (e.g. antigen-expressing, such as CAR-expressing cells) per kilogram body weight of the subject (cells/kg), such as no more than at or about 3×10⁵ cells/kg, no more than at or about 4×10⁵ cells/kg, no more than at or about 5×10⁵ cells/kg, no more than at or about 6×10⁵ cells/kg, no more than at or about 7×10⁵ cells/kg, no more than at or about 8×10⁵ cells/kg, no more than at or about 9×10⁵ cells/kg, no more than at or about 1 x 10⁶ cells/kg, or no more than at or about 2×10⁶ cells/kg. In some embodiments, the standard dose of cells comprises at least or at least about or at or about 2×10⁵ of the cells (e.g. antigen-expressing, such as CAR-expressing cells) per kilogram body weight of the subject (cells/kg), such as at least or at least about or at or about 3×10⁵ cells/kg, at least or at least about or at or about 4×10⁵ cells/kg, at least or at least about or at or about 5×10⁵ cells/kg, at least or at least about or at or about 6×10⁵ cells/kg, at least or at least about or at or about 7×10⁵ cells/kg, at least or at least about or at or about 8×10⁵ cells/kg, at least or at least about or at or about 9×10⁵ cells/kg, at least or at least about or at or about 1×10⁶ cells/kg, or at least or at least about or at or about 2×10⁶ cells/kg.

[0490] In certain embodiments, the cells are administered to the subject at a standard dose. In particular embodiments, the standard dose is or contains a range of about one million to about 100 billion cells and/or that amount of cells per kilogram of body weight, such as, e.g., 1 million to about 50 billion cells (e.g., about 5 million cells, about 25 million cells, about 500 million cells, about 1 billion cells, about 5 billion cells, about 20 billion cells, about 30 billion cells, about 40 billion cells, or a range defined by any two of the foregoing values), such as about 10 million to about 100 billion cells (e.g., about 20 million cells, about 30 million cells, about 40 million cells, about 60 million cells, about 70 million cells, about 80 million cells, about 90 million cells, about 10 billion cells, about 25 billion cells, about 50 billion cells, about 75 billion cells, about 90 billion cells, or a range defined by any two of the foregoing values), and in some cases about 100 million cells to about 50 billion cells (e.g., about 120 million cells, about 250 million cells, about 350 million cells, about 450 million cells, about 650 million cells, about 800 million cells, about 900 million cells, about 3 billion cells, about 30 billion cells, about 45 billion cells) or any value in between these ranges and/or per kilogram of body weight. Dosages may vary depending on attributes particular to the disease or disorder and/or patient and/or other treatments.

[0491] In some embodiments, for example, where the subject is a human, the dose includes fewer than about 5×10⁸ total recombinant receptor (e.g., CAR)-expressing cells, T cells, or peripheral blood mononuclear cells (PBMCs). In some embodiments, for example, where the subject is a human, the standard dose includes fewer than about 1×10⁸ total recombinant receptor (e.g., CAR)-expressing cells, T cells, or peripheral blood mononuclear cells (PBMCs), e.g., in the range of about 1×10⁶ to 1×10⁸ such cells, such as 2×10⁶, 5×10⁶, 1×10⁷, 5×10⁷, or 1×10⁸ or total such cells, or the range between any two of the foregoing values.

[0492] In some embodiments, the dose of genetically engineered cells comprises from or from about 1×10⁵ to 5×10⁸ total CAR-expressing T cells, 1×10⁵ to 2.5×10⁸ total CAR-expressing T cells, 1×10⁵ to 1×10⁸ total CAR-expressing T cells, 1×10⁵ to 5×10⁷ total CAR-expressing T cells, 1×10⁵ to 2.5×10⁷ total CAR-expressing T cells, 1×10⁵ to 1×10⁷ total CAR-expressing T cells, 1×10⁵ to 5×10⁶ total CAR-expressing T cells, 1×10⁵ to 2.5×10⁶ total CAR-expressing T cells, 1×10⁵ to 1×10⁶ total CAR-expressing T cells, 1×10⁶ to 5×10⁸ total CAR-expressing T cells, 1×10⁶ to 2.5×10⁸ total CAR-expressing T cells, 1×10⁶ to 1×10⁸ total CAR-expressing T cells, 1×10⁶ to 5×10⁷ total CAR-expressing T cells, 1×10⁶ to 2.5×10⁷ total CAR-expressing T cells, 1×10⁶ to 1×10⁷ total CAR-expressing T cells, 1×10⁶ to 5×10⁶ total CAR-expressing T cells, 1×10⁶ to 2.5×10⁶ total CAR-expressing T cells, 2.5×10⁶ to 5×10⁸ total CAR-expressing T cells, 2.5×10⁶ to 2.5×10⁸ total CAR-expressing T cells, 2.5×10⁶ to 1×10⁸ total CAR-expressing T cells, 2.5×10⁶ to 5×10⁷ total CAR-expressing T cells, 2.5×10⁶ to 2.5×10⁷ total CAR-expressing T cells, 2.5×10⁶ to 1×10⁷ total CAR-expressing T cells, 2.5×10⁶ to 5×10⁶ total CAR-expressing T cells, 5×10⁶ to 5×10⁸ total CAR-expressing T cells, 5×10⁶ to 2.5×10⁸ total CAR-expressing T cells, 5×10⁶ to 1×10⁸ total CAR-expressing T cells, 5×10⁶ to 5×10⁷ total CAR-expressing T cells, 5×10⁶ to 2.5×10⁷ total CAR-expressing T cells, 5×10⁶ to 1×10⁷ total CAR-expressing T cells, 1×10⁷ to 5×10⁸ total CAR-expressing T cells, 1×10⁷ to 2.5×10⁸ total CAR-expressing T cells, 1×10⁷ to 1×10⁸ total CAR-expressing T cells, 1×10⁷ to 5×10⁷ total CAR-expressing T cells, 1×10⁷ to 2.5×10⁷ total CAR-expressing T cells, 2.5×10⁷ to 5×10⁸ total CAR-expressing T cells, 2.5×10⁷ to 2.5×10⁸ total CAR-expressing T cells, 2.5×10⁷ to 1×10⁸ total CAR-expressing T cells, 2.5×10⁷ to 5×10⁷ total CAR-expressing T cells, 5×10⁷ to 5×10⁸ total CAR-expressing T cells, 5×10⁷ to 2.5×10⁸ total CAR-expressing T cells, 5×10⁷ to 1×10⁸ total CAR-expressing T cells, 1×10⁸ to 5×10⁸ total CAR-expressing T cells, 1×10⁸ to 2.5×10⁸ total CAR-expressing T cells, or 2.5×10⁸ to 5×10⁸ total CAR-expressing T cells.

[0493] In some embodiments, the dose of genetically engineered cells comprises at least or at least about 1×10⁵ CAR-expressing cells, at least or at least about 2.5×10⁵ CAR-expressing cells, at least or at least about 5×10⁵ CAR-expressing cells, at least or at least about 1×10⁶ CAR-expressing cells, at least or at least about 2.5×10⁶ CAR-expressing cells, at least or at least about 5×10⁶ CAR-expressing cells, at least or at least about 1×10⁷ CAR-expressing cells, at least or at least about 2.5×10⁷ CAR-expressing cells, at least or at least about 5×10⁷ CAR-expressing cells, at least or at least about 1×10⁸ CAR-expressing cells, at least or at least about 2.5×10⁸ CAR-expressing cells, or at least or at least about 5×10⁸ CAR-expressing cells.

[0494] In some embodiments, the cell therapy comprises administration of a dose comprising a number of cell from or from about 1×10⁵ to 5×10⁸ total recombinant receptor-expressing cells, total T cells, or total peripheral blood mononuclear cells (PBMCs), from or from about 5×10⁵ to 1×10⁷ total recombinant receptor-expressing cells, total T cells, or total peripheral blood mononuclear cells (PBMCs) or from or from about 1×10⁶ to 1×10⁷ total recombinant receptor-expressing cells, total T cells, or total peripheral blood mononuclear cells (PBMCs), each inclusive. In some embodiments, the cell therapy comprises administration of a dose of cells comprising a number of cells at least or at least about 1×10⁵ total recombinant receptor-expressing cells, total T cells, or total peripheral blood mononuclear cells (PBMCs), such at least or at least 1×10⁶, at least or at least about 1×10⁷, at least or at least about 1×10⁸ of such cells. In some embodiments, the number is with reference to the total number of CD3+ or CD8+, in some cases also recombinant receptor-expressing (e.g. CAR+) cells. In some embodiments, the cell therapy comprises administration of a dose comprising a number of cell from or from about 1×10⁵ to 5×10⁸ CD3+ or CD8+ total T cells or CD3+ or CD8+ recombinant receptor-expressing cells, from or from about 5×10⁵ to 1×10⁷ CD3+ or CD8+ total T cells or CD3+ or CD8+ recombinant receptor-expressing cells, or from or from about 1×10⁶ to 1×10⁷ CD3+ or CD8+ total T cells or CD3+ or CD8+ recombinant receptor-expressing cells, each inclusive. In some embodiments, the cell therapy comprises administration of a dose comprising a number of cell from or from about 1×10⁵ to 5×10⁸ total CD3+/CAR+ or CD8+/CAR+ cells, from or from about 5×10⁵ to 1×10⁷ total CD3+/CAR+or CD8+/CAR+ cells, or from or from about 1×10⁶ to 1×10⁷ total CD3+/CAR+ or CD8+/CAR+ cells, each inclusive.

[0495] In some embodiments, the T cells of the dose include CD4+ T cells, CD8+ T cells or CD4+ and CD8+ T cells.

[0496] In some embodiments, for example, where the subject is human, the CD8+ T cells of the dose, including in a dose including CD4+ and CD8+ T cells, includes between about 1×10⁶ and 5×10⁸ total recombinant receptor (e.g., CAR)-expressing CD8+cells, e.g., in the range of about 5×10⁶ to 1×10⁸ such cells, such cells 1×10⁷, 2.5×10⁷, 5×10⁷, 7.5×10⁷, 1×10⁸, or 5×10⁸ total such cells, or the range between any two of the foregoing values. In some embodiments, the patient is administered multiple doses, and each of the doses or the total dose can be within any of the foregoing values. In some embodiments, the dose of cells comprises the administration of from or from about 1×10⁷ to 0.75×10⁸ total recombinant receptor-expressing CD8+ T cells, 1×10⁷ to 2.5×10⁷ total recombinant receptor-expressing CD8+ T cells, from or from about 1×10⁷ to 0.75×10⁸ total recombinant receptor-expressing CD8+ T cells, each inclusive. In some embodiments, the dose of cells comprises the administration of or about 1×10⁷, 2.5×10⁷, 5×10⁷ 7.5×10⁷, 1×10⁸, or 5×10⁸ total recombinant receptor-expressing CD8+ T cells.

[0497] In certain embodiments, if the risk, probability, and/or likelihood that the subject will experience and/or develop a toxicity following administration of or associated with the cell therapy is determined to be high, increased, or elevated by one or more of the methods provided in Section-I, then the subject is administered a reduced, e.g. low, dose of the cell therapy. In some embodiments, a reduced dose is less than or equal to 90%, 85%, 80%, 75%, 70%, 65%, 60%, 55%, 50%, 45%, 40%, 35%, 30%, 25%, 20%, 15%, 10%, 5%, 3%, 1%, 0.5%, 0.1%, 0.05%, 0.01%, 0.001%, or 0.0001% of a standard dose.

[0498] In certain embodiments, a reduced dose of a therapeutic cell composition contains less than or equal to 90%, less than or equal to 80%, less than or equal to 70%, less than or equal to 60%, less than or equal to 50%, less than or equal to 40%, less than or equal to 30%, less than or equal to 20%, or less than or equal to 10%, or less than or equal to 1%, less than or equal to 0.1%, or less than or equal to 0.01% of the total amount of cells, CAR+ cells, CAR+CD4+ cells, and/or CD8+CAR+ cells of a standard dose of the therapeutic cell composition. In some embodiments, a reduced dose of a therapeutic cell composition contains less than or equal to 90%, less than or equal to 80%, less than or equal to 70%, less than or equal to 60%, less than or equal to 50%, less than or equal to 40%, less than or equal to 30%, less than or equal to 20%, or less than or equal to 10%, or less than or equal to 1%, less than or equal to 0.1%, or less than or equal to 0.01% of the amount of CAR+ cells of a standard dose of the therapeutic cell composition total amount of cells per kg of subject body weight, CAR+ cells per kg of subject body weight, CAR+CD4+ cells per kg of subject body weight, and/or CD8+CAR+ cells per kg of subject body weight.

[0499] In some embodiments, a subject that is determined to be at risk or likely at risk of developing a toxicity following administration of the cell therapy is administered a dose of genetically engineered cells, e.g. CAR-T cells, that is from or from about 2×10⁶ to 5×10⁷ total recombinant receptor-expressing cells, inclusive, or any range or number between any of the foregoing. In some embodiments, a subject that is determined to be at risk or likely at risk of developing a toxicity following administration of the cell therapy is administered a dose of genetically engineered cells, e.g. CAR-T cells, that is is from or from about 2×10⁵ cells/kg to 5×10⁵ cells/kg total recombinant receptor-expressing cells, inclusive, or any range or number between any of the foregoing.

[0500] In certain embodiments, if the risk, probability, and/or likelihood that the subject will experience and/or develop a toxicity following administration of or associated with the cell therapy is determined to be low, reduced, or decreased by one or more of the methods provided in Section-I, then the subject is administered a standard dose of the cell therapy. In some embodiments, a subject that is determined not to be at risk or likely not to be at risk of developing a toxicity following administration of the cell therapy is administered a dose of genetically engineered cells, e.g. CAR-T cells, that is from or from about 1×10⁷ to 2.0×10⁸ total recombinant receptor-expressing cells, inclusive, such as any number or range between any of the foregoing. In some embodiments, a subject that is determined not to be at risk or likely not to be at risk of developing a toxicity following administration of the cell therapy is administered a dose of genetically engineered cells, e.g. CAR-T cells, that is from or from about 1×10⁶ cells/kg to 2×10⁶ cells/kg total recombinant receptor-expressing cells, inclusive, such as any number or range between any of the foregoing.

[0501] In some embodiments, the subject is a subject that is known to or that has been selected based on having a Philadelphia chromosome (Ph+) and/or Ph chromosome-like (Ph-like) molecular subtype of acute lymphoblastic leukemia (ALL). In such embodiments, the subject is administered a relatively high dose. In some embodiments, a subject that has a Philadelphia chromosome (Ph+) and/or Ph chromosome-like (Ph-like) molecular subtype of acute lymphoblastic leukemia (ALL) is administered a dose of genetically engineered cells, e.g. CAR-T cells, that is from or from about 1×10⁷ to 2.0×10⁸ total recombinant receptor-expressing cells, inclusive, such as any number or range between any of the foregoing. In some embodiments, a subject that has a Philadelphia chromosome (Ph+) and/or Ph chromosome-like (Ph-like) molecular subtype of acute lymphoblastic leukemia (ALL) is administered a dose of genetically engineered cells, e.g. CAR-T cells, that is from or from about 1×10⁶ cells/kg to 2×10⁶ cells/kg total recombinant receptor-expressing cells, inclusive, such as any number or range between any of the foregoing.

[0502] In some embodiments, the dose of cells, e.g., recombinant receptor-expressing T cells, is administered to the subject as a single dose or is administered only one time within a period of two weeks, one month, three months, six months, 1 year or more.

[0503] In some aspects, the pharmaceutical compositions and formulations are provided as unit dose form compositions including the number of cells for administration in a given dose or fraction thereof. In some embodiments, the provided methods produce cells in a predictable timeline to dosing as compared to other methods of incubating (e.g., stimulating) cells. In some cases, the dose of cells for administration is determined based on the number of naïve-like cells in the input cell composition. In some embodiments, the unit dose is a standard dose.

[0504] In some embodiments, cells of the dose may be administered by administration of a plurality of compositions or solutions, such as a first and a second, optionally more, each containing some cells of the dose. In some aspects, the plurality of compositions, each containing a different population and/or sub-types of cells, are administered separately or independently, optionally within a certain period of time. For example, the populations or sub-types of cells can include CD8⁺ and CD4⁺ T cells, respectively, and/or CD8+- and CD4+-enriched populations, respectively, e.g., CD4+ and/or CD8+ T cells each individually including cells genetically engineered to express the recombinant receptor. In some embodiments, the administration of the dose comprises administration of a first composition comprising a dose of CD8+ T cells or a dose of CD4+ T cells and administration of a second composition comprising the other of the dose of CD4+ T cells and the CD8+ T cells.

[0505] In some embodiments, the administration of the composition or dose, e.g., administration of the plurality of cell compositions, involves administration of the cell compositions separately. In some aspects, the separate administrations are carried out simultaneously, or sequentially, in any order. In some embodiments, the dose comprises a first composition and a second composition, and the first composition and second composition are administered 0 to 12 hours apart, 0 to 6 hours apart or 0 to 2 hours apart. In some embodiments, the initiation of administration of the first composition and the initiation of administration of the second composition are carried out no more than 2 hours, no more than 1 hour, or no more than 30 minutes apart, no more than 15 minutes, no more than 10 minutes or no more than 5 minutes apart. In some embodiments, the initiation and/or completion of administration of the first composition and the completion and/or initiation of administration of the second composition are carried out no more than 2 hours, no more than 1 hour, or no more than 30 minutes apart, no more than 15 minutes, no more than 10 minutes or no more than 5 minutes apart.

[0506] In some composition, the first composition, e.g., first composition of the dose, comprises CD4+ T cells. In some composition, the first composition, e.g., first composition of the dose, comprises CD8+ T cells. In some embodiments, the first composition is administered prior to the second composition.

[0507] In some embodiments, the dose or composition of cells includes a defined or target ratio of CD4+ cells expressing a recombinant receptor to CD8+ cells expressing a recombinant receptor and/or of CD4+ cells to CD8+ cells, which ratio optionally is approximately 1:1 or is between approximately 1:3 and approximately 3:1, such as approximately 1:1. In some aspects, the administration of a composition or dose with the target or desired ratio of different cell populations (such as CD4+:CD8+ ratio or CAR+CD4+:CAR+CD8+ ratio, e.g., 1:1) involves the administration of a cell composition containing one of the populations and then administration of a separate cell composition comprising the other of the populations, where the administration is at or approximately at the target or desired ratio. In some aspects, administration of a dose or composition of cells at a defined ratio leads to improved expansion, persistence and/or antitumor activity of the T cell therapy.

[0508] In some embodiments, the subject receives multiple doses, e.g., two or more doses or multiple consecutive doses, of the cells. In some embodiments, two doses are administered to a subject. In some embodiments, the subject receives the consecutive dose, e.g., second dose, is administered approximately 4, 5, 6, 7, 8, 9, 10, 11, 12, 13, 14, 15, 16, 17, 18, 19, 20 or 21 days after the first dose. In some embodiments, multiple consecutive doses are administered following the first dose, such that an additional dose or doses are administered following administration of the consecutive dose. In some aspects, the number of cells administered to the subject in the additional dose is the same as or similar to the first dose and/or consecutive dose. In some embodiments, the additional dose or doses are larger than prior doses.

[0509] In some aspects, the size of the first and/or consecutive dose is determined based on one or more criteria such as response of the subject to prior treatment, e.g. chemotherapy, disease burden in the subject, such as tumor load, bulk, size, or degree, extent, or type of metastasis, stage, and/or likelihood or incidence of the subject developing toxic outcomes, e.g., CRS, macrophage activation syndrome, tumor lysis syndrome, neurotoxicity, and/or a host immune response against the cells and/or recombinant receptors being administered.

[0510] In some aspects, the time between the administration of the first dose and the administration of the consecutive dose is about 9 to about 35 days, about 14 to about 28 days, or 15 to 27 days. In some embodiments, the administration of the consecutive dose is at a time point more than about 14 days after and less than about 28 days after the administration of the first dose. In some aspects, the time between the first and consecutive dose is about 21 days. In some embodiments, an additional dose or doses, e.g. consecutive doses, are administered following administration of the consecutive dose. In some aspects, the additional consecutive dose or doses are administered at least about 14 and less than about 28 days following administration of a prior dose. In some embodiments, the additional dose is administered less than about 14 days following the prior dose, for example, 4, 5, 6, 7, 8, 9, 10, 11, 12, or 13 days after the prior dose. In some embodiments, no dose is administered less than about 14 days following the prior dose and/or no dose is administered more than about 28 days after the prior dose.

[0511] In some embodiments, the dose of cells, e.g., recombinant receptor-expressing cells, comprises two doses (e.g., a double dose), comprising a first dose of the T cells and a consecutive dose of the T cells, wherein one or both of the first dose and the second dose comprises administration of the split dose of T cells.

[0512] In some aspects, the size of a dose, e.g., standard dose is determined by the burden of the disease or condition in the subject. For example, in some aspects, the number of cells administered in the dose is determined based on the tumor burden that is present in the subject immediately prior to administration of the initiation of the dose of cells. In some embodiments, the size of the first and/or subsequent standard dose is inversely correlated with disease burden. In some aspects, as in the context of a large disease burden, the subject is administered a low number of cells. In other embodiments, as in the context of a lower disease burden, the subject is administered a larger number of cells.

[0513] In some aspects, the size of the standard dose is determined by the subject's risk for toxicity, e.g., as assessed by the expression of one or more genes in a sample such as a bone marrow aspirate sample. In some aspects, the number of cells administered in the dose is determined based on the gene expression of a sample that is collected prior to such as immediately prior to administration of the initiation of the dose of cells. In some embodiments, the size of the first and/or subsequent dose is inversely correlated with the risk for toxicity. In some aspects, as in the context of a likelihood and/or elevated risk or probability of toxicity, the subject is administered a low number of cells. In other embodiments, as in the context of a lower risk or probability, the subject is administered a larger number of cells.

[0514] In some aspects, the size of the standard dose is determined by the activity of the cells of the cell therapy, e.g., as determined by measuring one or more parameters of the cell therapy. In some aspects, the number of cells administered in the dose is determined based on the activity of the cells of the cell therapy. In some embodiments, the size of the first and/or subsequent dose is inversely correlated with the amount or level of activity in the cells. In particular embodiments, the number of cells administered in the dose is determined by the activity of the cells of the cell therapy and the risk of the subject for a toxicity. In certain embodiments, the subject is administered a standard dose of the cell therapy if the cells have a low or moderate activity as determined by measuring the one or more parameters, regardless of the risk assessment provided by the measuring the expression of one or more genes of a sample form the subject.

[0515] In some embodiments, the size of the standard dose is determined by the disease-subtype of the subject. In certain embodiments, the subject has cancer and/or a proliferative disease. In some embodiments, the cancer or proliferative disease is ALL. In certain embodiments, the subject has or is suspected of having ALL of a particular subtype. In some embodiments, the size of the first and/or subsequent dose is reduced if the ALL subtype is not Philadelphia positive and/or if cells of the bone marrow do contain a Philadelphia chromosome. In particular embodiments, the size of the first and/or subsequent dose is reduced if the ALL subtype is not the Philadelphia-like subtype and/or if cells of the bone marrow do contain a Philadelphia-like gene signature and/or expression profile. In some embodiments, the size of the first and/or subsequent dose is reduced if the ALL subtype is not the Philadelphia positive or the Philadelphia-like subtype. In particular embodiments, the first and/or subsequent dose is a standard dose if the ALL subtype is the Philadelphia positive or the Philadelphia-like subtype.

[0516] Following administration of the cells, the biological activity of the engineered cell populations in some embodiments is measured, e.g., by any of a number of known methods. Parameters to assess include specific binding of an engineered or natural T cell or other immune cell to antigen, in vivo, e.g., by imaging, or ex vivo, e.g., by ELISA or flow cytometry. In certain embodiments, the ability of the engineered cells to destroy target cells can be measured using any suitable method, such as cytotoxicity assays described in, for example, Kochenderfer et al., J. Immunotherapy, 32(7): 689-702 (2009), and Herman et al. J. Immunological Methods, 285(1): 25-40 (2004). In certain embodiments, the biological activity of the cells is measured by assaying expression and/or secretion of one or more cytokines, such as CD 107a, IFNγ, IL-2, and TNF. In some aspects the biological activity is measured by assessing clinical outcome, such as reduction in tumor burden or load.

[0517] The cells can be administered by any suitable means. The cells are administered in a dosing regimen to achieve a therapeutic effect, such as a reduction in tumor burden. Dosing and administration may depend in part on the schedule of administration of the immunomodulatory compound, which can be administered prior to, subsequent to and/or simultaneously with initiation of administration of the T cell therapy. Various dosing schedules of the T cell therapy include but are not limited to single or multiple administrations over various time-points, bolus administration, and pulse infusion. In certain embodiments, the engineered T cells express a recombinant receptor. In certain embodiments, the engineered T cells express a CAR.

[0518] In particular embodiments, the ratio of the CD4+ T cells to CD8+ T cells that are administered to the subject in the same composition, dose, or mixture is between 5:1 to 0.2:1, between 4:1 to 0.25:1, between 3:1 to 0.33:1, between 2:1 to 0.5:1, between 1.5:1 to 0.66:1, or between 1.25:1 to 0.8:1. In some embodiments, the ratio of CD4+ T cells to CD8+ T cells administered to the subject in the same composition, dose, or mixture is or is about 2.0:1, 1.9:1, 1.8:1, 1.7:1, 1.6:1, 1.5:1, 1.4:1, 1.3:1, 1.2:1, 1.1:1, 1.0:1, 0.9:1, 0.8:1, 0.7:1, 0.6:1, or 0.5:1.

[0519] In particular embodiments, the ratio of recombinant receptor expressing CD4+ T cells to recombinant receptor expressing CD8+ T cells that are administered to the subject in the same composition, dose, or mixture is between 5:1 to 0.2:1, between 4:1 to 0.25:1, between 3:1 to 0.33:1, between 2:1 to 0.5:1, between 1.5:1 to 0.66:1, or between 1.25:1 to 0.8:1. In certain embodiments, the ratio of recombinant receptor expressing CD4+ T cells to recombinant receptor expressing CD8+ T cells that are administered to the subject in the same composition, dose, or mixture is or is about 2.0:1, 1.9:1, 1.8:1, 1.7:1, 1.6:1, 1.5:1, 1.4:1, 1.3:1, 1.2:1, 1.1:1, 1.0:1, 0.9:1, 0.8:1, 0.7:1, 0.6:1, or 0.5:1. In particular embodiments, ratio of the administered recombinant receptor expressing CD4+ T cells to recombinant receptor expressing CD8+ T cells is or is about 1:1. In some embodiments, the recombinant receptor is a TCR or a CAR. In particular embodiments, the recombinant receptor is a CAR.

[0520] In some embodiments, the ratio of engineered CD4+ T cells to engineered CD8+ T cells of the dose, composition, or mixture that is administered to the subject is within a certain tolerated difference or range of error of such a defined, desired, or fixed ratio. In some embodiments, the tolerated difference is within of or of about 1%, 2%, 3%, 4%, 5%, 10%, 15%, 20%, 25%, 30%, 35%, 40%, 45%, or 50%, of the target, defined, preferred, and/or fixed ratio.

[0521] In some embodiments, a composition of cells produced by the methods provided herein, e.g., an output composition, having a ratio of engineered CD4+ T cells to engineered CD8+ T cells of between 2:1 and 0.5:1 is administered to a subject in a single composition, dose, or mixture. In certain embodiments, the composition contains a ratio of engineered CD4+ T cells to engineered CD8+ T cells of or of about 1:1. In some embodiments, a cell composition produced from an input cell composition, e.g., an input cell composition described in Section I-A1, has a ratio of engineered CD4+ T cells to engineered CD8+ T cells of between 2:1 and 0.5:1 and is administered to a subject in a single composition, dose, or mixture. In particular embodiments, the cell composition produced from an input cell composition has a ratio of engineered CD4+ T cells to engineered CD8+ T cells of 1:1with a tolerated difference of 50%, 25%, 10%, or less.

### IV. INTERVENTIOND TO PREVENT, REDUCE, OR TREAT TOXICITY

[0522] Particular embodiments of the methods provided herein include one or more steps of administering an intervention or interventions to a subject to prevent, reduce, ameliorate, and/or treat neurotoxicity and/or to prevent or reduce the likelihood or probability of neurotoxicity. In certain embodiments, the subject is likely to develop toxicity, e.g., severe neurotoxicity, to a therapy, e.g., an immunotherapy or a cell therapy such as a CAR-T cell therapy, and/or has an increased risk, probability, or likelihood of developing toxicity following administration of the therapy as determined by one or more methods provided in Section I. In certain embodiments, the therapy is an immunotherapy. In particular embodiments, the therapy is a cell therapy. In particular embodiments, the cell therapy is a cell therapy that is or includes CAR expressing cells.

[0523] In some embodiments, the intervention is or includes administration of one or more agents or other treatments capable of treating, preventing, delaying, or attenuating the development of a toxicity. In some embodiments, the intervention is administered prior to and/or concurrently with administration of the therapy. In some examples, the agent or other treatment capable of treating, preventing, delaying, or attenuating the development of a toxicity is administered (i) prior to, (ii) within one, two, or three days of, (iii) concurrently with and/or (iv) at first fever following, the initiation of administration of the cell therapy to the subject. In some embodiments, the therapy is an immunotherapy or a cell therapy. In particular embodiments, the therapy is a CAR-T cell therapy.

[0524] The agent or treatments are administered following or based on the results of an assessment, in a biological sample (e.g. apheresis or leukapheresis sample) for the expression of one or more genes that are positively or negatively associated with the toxicity following administration of a therapy. In some embodiments, the one or more genes are provided in Section I-B. In particular embodiments, the subject is determined to have an elevated or increased risk of developing a toxicity, e.g., a severe neurotoxicity, based on the expression of one or more genes provided in Section 2, Table 1, Table 2, Table E2A, Table E2B, and/or Table E4 (e.g. a subset of these genes in the relevant Table which as a recited SEQ ID NO, and/or a Uniprot ID), as assessed by the methods described in herein, e.g., Section-I.

[0525] A. Toxicity

[0526] In some aspects, the provided embodiments are based on observations that the efficacy of a therapy, e.g., a cell therapy, may be limited by the development of toxicity in the subject to whom such cells are administered, which toxicity in some cases can be severe. For example, in some cases, administering a dose of cells expressing a recombinant receptor, e.g. a CAR, can result in toxicity or risk thereof, such as CRS or neurotoxicity. In some cases, while a higher dose of such cells can increase the efficacy of the treatment, for example, by increasing exposure to the cells such as by promoting expansion and/or persistence, they may also result in an even greater risk of developing a toxicity or a more severe toxicity.

[0527] In some embodiments, the provided embodiments are designed to or include features that result in a lower degree of risk of toxicity, a toxic outcome or symptom, toxicity-promoting profile, factor or property, such as a symptom or outcome associated with or indicative of cytokine release syndrome (CRS) or neurotoxicity, for example, compared to other methods in which the subject and/or a biological sample from the subject has not been assessed in a assay for safety control and/or in which the therapy has not been administered to a subject in accord with an assessment of any preexisting risk of the subject to toxicity following administration of the therapeutic cell composition.

[0528] In some aspects, the toxic outcome of a therapy, such as a cell therapy, is or is associated with or indicative of cytokine release syndrome (CRS) or severe CRS (sCRS). CRS, e.g., sCRS, can occur in some cases following adoptive T cell therapy and administration to subjects of other biological products. See Davila et al., Sci Transl Med 6, 224ra25 (2014); Brentjens et al., Sci. Transl. Med. 5, 177ra38 (2013); Grupp et al., N. Engl. J. Med. 368, 1509-1518 (2013); and Kochenderfer et al., Blood 119, 2709-2720 (2012); Xu et al., Cancer Letters 343 (2014) 172-78.

[0529] Typically, CRS is caused by an exaggerated systemic immune response mediated by, for example, T cells, B cells, NK cells, monocytes, and/or macrophages. Such cells may release a large amount of inflammatory mediators such as cytokines and chemokines. Cytokines may trigger an acute inflammatory response and/or induce endothelial organ damage, which may result in microvascular leakage, heart failure, or death. Severe, life-threatening CRS can lead to pulmonary infiltration and lung injury, renal failure, or disseminated intravascular coagulation. Other severe, life-threatening toxicities can include cardiac toxicity, respiratory distress, neurologic toxicity and/or hepatic failure.

[0530] Outcomes, signs and symptoms of CRS are known and include those described herein. In some embodiments, where a particular dosage regimen or administration effects or does not effect a given CRS-associated outcome, sign, or symptom, particular outcomes, signs, and symptoms and/or quantities or degrees thereof may be specified.

[0531] In the context of administering CAR-expressing cells, CRS, such as severe CRS, typically occurs 6-20 days after infusion of cells that express a CAR. See Xu et al., Cancer Letters 343 (2014) 172-78. In some cases, CRS occurs less than 6 days or more than 20 days after CAR T cell infusion. The incidence and timing of CRS may be related to baseline cytokine levels or tumor burden at the time of infusion. Commonly, CRS involves elevated serum levels of interferon (IFN)-γ, tumor necrosis factor (TNF-alpha or TNFa), and/or interleukin (IL)-2. Other cytokines that may be rapidly induced in CRS are IL-1β, IL-6, IL-8, and IL-10.

[0532] CRS criteria that appear to correlate with the onset of CRS to predict which patients are more likely to be at risk for developing sCRS have been developed (see Davilla et al. Science translational medicine. 2014;6(224):224ra25). Factors include fevers, hypoxia, hypotension, neurologic changes, elevated serum levels of inflammatory cytokines, such as a set of seven cytokines (IFNγ, IL-5, IL-6, IL-10, Flt-3L, fractalkine, and GM-CSF) whose treatment-induced elevation can correlate well with both pretreatment tumor burden and sCRS symptoms. Other guidelines on the diagnosis and management of CRS are known (see e.g., Lee et al, Blood. 2014;124(2):188-95). In some embodiments, the criteria reflective of CRS grade are those detailed in Table 4 below.

TABLE 4
Exemplary Grading Criteria for CRS

| Grade | Description of Symptoms |
|---|---|
| 1 | Not life-threatening, require only symptomatic |
| Mild | treatment such as antipyretics and anti-emetics |
| | (e.g., fever, nausea, fatigue, headache, |
| | myalgias, malaise) |
| 2 | Require and respond to moderate intervention: |
| Moderate | Oxygen requirement <40%, or |
| | Hypotension responsive to fluids or low dose of |
| | a single vasopressor, or |
| | Grade 2 organ toxicity (by CTCAE v4.0) |
| 3 | Require and respond to aggressive intervention: |
| Severe | Oxygen requirement ≥40%, or |
| | Hypotension requiring high dose of a single |
| | vasopressor (e.g., norepinephrine ≥20 |
| | μg/kg/min, dopamine ≥10 μg/kg/min, |
| | phenylephrine ≥200 μg/kg/min, or epinephrine |
| | ≥10 μg/kg/min), or |
| | Hypotension requiring multiple vasopressors (e.g., |
| | vasopressin + one of the above agents, or |
| | combination vasopressors equivalent to ≥20 |
| | μg/kg/min norepinephrine), or |
| | Grade 3 organ toxicity or Grade 4 transaminitis |
| | (by CTCAE v4.0) |
| 4 | Life-threatening: |
| Life- | Requirement for ventilator support, or |
| threatening | Grade 4 organ toxicity (excluding transaminitis) |
| 5 | Death |
| Fatal | |

[0533] In some embodiments, a subject is deemed to develop “severe CRS” (“sCRS”) in response to or secondary to administration of a cell therapy or dose of cells thereof, if, following administration, the subject displays: (1) fever of at least 38 degrees Celsius for at least three days; (2) cytokine elevation that includes either (a) a max fold change of at least 75 for at least two of the following group of seven cytokines compared to the level immediately following the administration: interferon gamma (IFNγ), GM-CSF, IL-6, IL-10, Flt-3L, fracktalkine, and IL-5 and/or (b) a max fold change of at least 250 for at least one of the following group of seven cytokines compared to the level immediately following the administration: interferon gamma (IFNγ), GM-CSF, IL-6, IL-10, Flt-3L, fracktalkine, and IL-5; and (c) at least one clinical sign of toxicity such as hypotension (requiring at least one intravenous vasoactive pressor) or hypoxia (PO₂<90%) or one or more neurologic disorder(s) (including mental status changes, obtundation, and/or seizures). In some embodiments, severe CRS includes CRS with a grade of 3 or greater, such as set forth in Table 4.

[0534] In some embodiments, outcomes associated with severe CRS or grade 3 CRS or greater, such as grade 4 or greater, such as set forth in Table 4. In some embodiments, these include one or more of: persistent fever, e.g., fever of a specified temperature, e.g., greater than at or about 38 degrees Celsius, for two or more, e.g., three or more, e.g., four or more days or for at least three consecutive days; fever greater than at or about 38 degrees Celsius; elevation of cytokines, such as a max fold change, e.g., of at least at or about 75, compared to pre-treatment levels of at least two cytokines (e.g., at least two of the group consisting of interferon gamma (IFNy), GM-CSF, IL-6, IL-10, Flt-3L, fracktalkine, and IL-5, and/or tumor necrosis factor alpha (TNF-alpha or TNFα)), or a max fold change, e.g., of at least at or about 250 of at least one of such cytokines; and/or at least one clinical sign of toxicity, such as hypotension (e.g., as measured by at least one intravenous vasoactive pressor); hypoxia (e.g., plasma oxygen (PO₂) levels of less than at or about 90%); and/or one or more neurologic disorders (including mental status changes, obtundation, and seizures). In some embodiments, severe CRS includes CRS that requires management or care in the intensive care unit (ICU).

[0535] In some embodiments, severe CRS encompasses a combination of (1) persistent fever (fever of at least 38 degrees Celsius for at least three days) and (2) a serum level of CRP of at least at or about 20 mg/dL. In some embodiments, severe CRS encompasses hypotension requiring the use of two or more vasopressors or respiratory failure requiring mechanical ventilation. In some embodiments, the dosage of vasopressors is increased in a second or subsequent administration.

[0536] In some embodiments, severe CRS or grade 3 CRS encompasses an increase in alanine aminotransferase, an increase in aspartate aminotransferase, chills, febrile neutropenia, headache, left ventricular dysfunction, encephalopathy, hydrocephalus, and/or tremor.

[0537] In some aspects, the toxic outcome of a therapy, such as a cell therapy, is or is associated with or indicative of neurotoxicity or severe neurotoxicity. In some embodiments, symptoms associated with a clinical risk of neurotoxicity include confusion, delirium, expressive aphasia, obtundation, myoclonus, lethargy, altered mental status, convulsions, seizure-like activity, seizures (optionally as confirmed by electroencephalogram [EEG]), elevated levels of beta amyloid (Aβ), elevated levels of glutamate, and elevated levels of oxygen radicals. In some embodiments, neurotoxicity is graded based on severity (e.g., using a Grade 1-5 scale (see, e.g., Guido Cavaletti & Paola Marmiroli Nature Reviews Neurology 6, 657-666 (December 2010); National Cancer Institute—Common Toxicity Criteria version 4.03 (NCI-CTCAE v4.03).

[0538] In some instances, neurologic symptoms may be the earliest symptoms of sCRS. In some embodiments, neurologic symptoms are seen to begin 5 to 7 days after cell therapy infusion. In some embodiments, duration of neurologic changes may range from 3 to 19 days. In some cases, recovery of neurologic changes occurs after other symptoms of sCRS have resolved. In some embodiments, time or degree of resolution of neurologic changes is not hastened by treatment with anti-IL-6 and/or steroid(s).

[0539] In some embodiments, a subject is deemed to develop “severe neurotoxicity” in response to, or secondary to, administration of a cell therapy or dose of cells thereof, if, following administration, the subject displays symptoms that limit self-care (e.g. bathing, dressing and undressing, feeding, using the toilet, taking medications) from among: 1) symptoms of peripheral motor neuropathy, including inflammation or degeneration of the peripheral motor nerves; 2) symptoms of peripheral sensory neuropathy, including inflammation or degeneration of the peripheral sensory nerves, dysesthesia, such as distortion of sensory perception, resulting in an abnormal and unpleasant sensation, neuralgia, such as intense painful sensation along a nerve or a group of nerves, and/or paresthesia, such as functional disturbances of sensory neurons resulting in abnormal cutaneous sensations of tingling, numbness, pressure, cold and warmth in the absence of stimulus. In some embodiments, severe neurotoxicity includes neurotoxicity with a grade of 3 or greater, such as set forth in Table 5. In some embodiments, a severe neurotoxicity is deemed to be a prolonged grade 3 if symptoms or grade 3 neurotoxicity last for 10 days or longer.

TABLE 5
Exemplary Grading Criteria for neurotoxicity

| Grade | Description of Symptoms |
|---|---|
| 1 | Mild or asymptomatic symptoms |
| Asymptomatic | |
| or Mild | |
| 2 | Presence of symptoms that limit instrumental |
| Moderate | activities of daily living (ADL), such as preparing |
| | meals, shopping for groceries or clothes, using the |
| | telephone, managing money |
| 3 | Presence of symptoms that limit self-care ADL, such |
| Severe | as bathing, dressing and undressing, feeding self, |
| | using the toilet, taking medications |
| 4 | Symptoms that are life-threatening, requiring |
| Life- | urgent intervention |
| threatening | |
| 5 | Death |
| Fatal | |

[0540] In some embodiments, the provided embodiments, including methods of treatment, lead to reduced symptoms associated with neurotoxicity following cell therapy compared to other methods. For example, subjects treated according to the provided methods may have reduced symptoms of neurotoxicity, such as limb weakness or numbness, loss of memory, vision, and/or intellect, uncontrollable obsessive and/or compulsive behaviors, delusions, headache, cognitive and behavioral problems including loss of motor control, cognitive deterioration, and autonomic nervous system dysfunction, and sexual dysfunction, compared to subjects treated by other methods. In some embodiments, subjects treated according to the provided methods may have reduced symptoms associated with peripheral motor neuropathy, peripheral sensory neuropathy, dysesthesia, neuralgia or paresthesia.

[0541] In some embodiments, the methods reduce outcomes associated with neurotoxicity including damages to the nervous system and/or brain, such as the death of neurons. In some aspects, the methods reduce the level of factors associated with neurotoxicity such as beta amyloid (Aβ), glutamate, and oxygen radicals.

[0542] B. Methods for Intervention

[0543] In some embodiments, a subject with a high, elevated, and/or increased risk of a toxicity following administration of a therapeutic cell composition is administered an intervention or interventions, including by administration of agents or therapies that treat the toxicity (e.g. neurotoxicity, such as severe neurotoxicity and/or CRS, such as severe CRS) and/or that prevent, delay, or attenuate the development of or risk for developing neurotoxicity, e.g., severe neurotoxicity and/or CRS, such as severe CRS. Thus, in some embodiments, provided herein is an intervention or interventions, including agents or therapies that treat the toxicity and/or that prevent, delay, or attenuate the development of or risk for developing neurotoxicity or CRS. Also provided are compositions and formulations, e.g., pharmaceutical formulations, comprising one or more of the agents.

[0544] In some embodiments, the methods provided herein allows for selection of a subject for an intervention, e.g., administration of an agent or other treatment capable of treating, preventing, delaying, reducing or attenuating the development or risk of development of a toxicity following administration of the therapy, by identifying subject at with a likelihood and/or an increased risk, probability, or likelihood of developing or experiencing toxicity following administration of a therapy, e.g., an immunotherapy or cell therapy. In some embodiments, the intervention is administered (i) prior to, (ii) within one, two, or three days of, (iii) concurrently with and/or (iv) at first fever following, the initiation of administration of the cell therapy to the subject.

[0545] In some embodiments, the subject is not administered or provided with an intervention, e.g., an agent or treatment capable of treating, preventing, delaying, reducing or attenuating the development or risk of development of a toxicity such as described in Section IV-C, prior to the administration of the therapy, e.g., the immunotherapy and/or cell therapy. In some embodiments, the subject is not administered or provided with the intervention for a period of time following the initiation of the administration of the therapy. In some embodiments, the period of time is or is about 1, 2, 3, 4, 5, 6, 7, 8, 9, 10, 11, 12, 13, 14, or 15 days, and/or is or is about 1, 2, 3, 4, 5, 6, or longer than 6 weeks after the administration of the therapy. In some embodiments, the subject is not administered or provided with the intervention following administration of the dose, prior to or unless the subject exhibits a sign or symptom of toxicity, e.g., a sign or symptom of toxicity described in Section IV-A. In some embodiments, the subject is not administered or provided with the intervention following administration of the dose, prior to or unless the subject exhibits a sign or symptom of the toxicity other than a fever, unless the fever is a sustained fever or if the fever is not reduced by more than 1° C. after treatment with an antipyretic.

[0546] In some embodiments, the subject is administered or provided with an intervention, e.g., an agent or treatment capable of treating, preventing, delaying, reducing or attenuating the development or risk of development of a toxicity such as described in Section IV-C, prior to the administration of the therapy, e.g., the immunotherapy and/or cell therapy. In some embodiments, the subject has been determined to have a high, increased, or elevated risk for toxicity. In some embodiments, the subject is administered or provided with an intervention within period of time following the initiation of the administration of the therapy, such as at or about within 1, 2, 3, 4, 5 days after the administration of the therapy. In some embodiments, the subject is administered or provided with the intervention at the first sign or symptom of toxicity, e.g., a sign or symptom of toxicity described in Section IV-A.

[0547] In some embodiments, the agent, e.g., a toxicity-targeting agent, or treatment capable of treating, preventing, delaying, or attenuating the development of a toxicity is a steroid, is an antagonist or inhibitor of a cytokine receptor, such as IL-6 receptor, CD122 receptor (IL-2Rbeta receptor), or CCR2, or is an inhibitor of a cytokine, such as IL-6, MCP-1, IL-10, IFN-γ, IL-8, or IL-18. In some embodiments, the agent is an agonist of a cytokine receptor and/or cytokine, such as TGF-β. In some embodiments, the agent, e.g., agonist, antagonist or inhibitor, is an antibody or antigen-binding fragment, a small molecule, a protein or peptide, or a nucleic acid.

[0548] In some embodiments, a fluid bolus can be employed as an intervention, such as to treat hypotension associated with CRS. In some embodiments, the target hematocrit levels are >24%. In some embodiments, the intervention includes the use of absorbent resin technology with blood or plasma filtration. In some cases, the intervention includes dialysis, plasmapheresis, or similar technologies. In some embodiments, vasopressors or acetaminophen can be employed.

[0549] In some embodiments, the agent can be administered sequentially, intermittently, or at the same time as or in the same composition as the therapy, such as cells for adoptive cell therapy. For example, the agent can be administered before, during, simultaneously with, or after administration of the immunotherapy and/or cell therapy.

[0550] In some embodiments, the agent is administered at a time as described herein and in accord with the provided methods. In some embodiments, the toxicity-targeting agent is administered at a time that is within, such as less than or no more than, 3, 4, 5, 6, 7, 8, 9 or 10 days after initiation of the immunotherapy and/or cell therapy. In some embodiments, the toxicity-targeting agent is administered within or within about 1 day, 2 days or 3 days after initiation of administration of the immunotherapy and/or cell therapy.

[0551] In some embodiments, the agent, e.g., toxicity-targeting agent, is administered to a subject after initiation of administration of the immunotherapy and/or cell therapy at a time at which the subject does not exhibit grade 2 or higher CRS or grade 2 or higher neurotoxicity. In some embodiments, the subject has been determined to be at high risk for toxicity and/or to have an increased risk, probability or likelihood of developing toxicity following administration of the therapy, for example by the methods provided in Section I. In some aspects, the toxicity-targeting agent is administered after initiation of administration of the immunotherapy and/or cell therapy at a time at which the subject does not exhibit severe CRS or severe neurotoxicity. Thus, between initiation of administration of the immunotherapy and/or cell therapy and the toxicity-targeting agent, the subject, e.g., the subject at risk for toxicity, is one that does not exhibit grade 2 or higher CRS, such as severe CRS, and/or does not exhibit grade 2 or higher neurotoxicity, such as severe neurotoxicity.

[0552] Non-limiting examples of interventions for treating or ameliorating a toxicity, such as severe CRS (sCRS), are described in Table 6A. In some embodiments, the intervention includes tocilizumab or other toxicity-targeting agent as described, which can be at a time in which there is a sustained or persistent fever of greater than or about 38° C. or greater than or greater than about 39° C. in the subject. In some embodiments, the fever is sustained in the subject for more than 10 hours, more than 12 hours, more than 16 hours, or more than 24 hours before intervention.

TABLE 6A
Examples of interventions for treating or ameliorating a toxicity

| Symptoms related to CRS | Suggested Intervention |
|---|---|
| Fever of ≥38.3° C. | Acetaminophen (12.5 mg/kg) PO/IV up to |
| | every four hours |
| Persistent fever of ≥39° C. for 10 hours that is | Tocilizumab (8-12 mg/kg) IV |
| unresponsive to acetaminophen | |
| Persistent fever of ≥39° C. after tocilizumab | Dexamethasone 5-10 mg IV/PO up to every 6- |
| | 12 hours with continued fevers |
| Recurrence of symptoms 48 hours after initial | Tocilizumab (8-12 mg/kg) IV |
| dose of tocilizumab | |
| Hypotension | Fluid bolus, target hematocrit >24% |
| Persistent/recurrent hypotension after initial | Tocilizumab (8-12 mg/kg) IV |
| fluid bolus (within 6 hours) | |
| Use of low dose pressors for hypotension for | Dexamethasone 5-10 mg IV/PO up to every 6 |
| longer than 12 hours | hours with continued use of pressors |
| Initiation of higher dose pressors or addition of | Dexamethasone 5-10 mg IV/PO up to every 6 |
| a second pressor for hypotension | hours with continued use of pressors |
| Initiation of oxygen supplementation | Tocilizumab (8-12 mg/kg) IV |
| Increasing respiratory support with concern for | Dexamethasone 5-10 mg IV/PO up to every 6 |
| impending intubation | hours with continued use of pressors |
| Recurrence/Persistence of symptoms for which | Tocilizumab (8-12 mg/kg) IV |
| tocilizumab was given ≥48 hours after initial | |
| dose was administered | |

[0553] In some cases, the agent or treatment is administered alone or is administered as part of a composition or formulation, such as a pharmaceutical composition or formulation, as described herein. Thus, the agent alone or as part of a pharmaceutical composition can be administered intravenously or orally, or by any other acceptable known route of administration or as described herein.

[0554] In some embodiments, the dosage of agent or the frequency of administration of the agent in a dosage regimen is reduced compared to the dosage of the agent or its frequency in a method in which a subject is treated with the agent after grade 2 or higher CRS or neurotoxicity, such as after severe, e.g., grade 3 or higher, CRS or after severe, e.g., grade 3 or higher neurotoxicity, has developed or been diagnosed (e.g. after physical signs or symptoms of grade 3 or higher CRS or neurotoxicity has manifested). In some embodiments, the dosage of agent or the frequency of administration of the agent in a dosage regimen is reduced compared to the dosage of the agent or its frequency in a method in which a subject is treated for CRS or neurotoxicity greater than 3 days, 4 days, 5 days, 6 days, 1 week, 2 weeks, three weeks, or more after administration of the immunotherapy and/or cell therapy. In some embodiments, the dosage is reduced by greater than or greater than about 1.2-fold, 1.5-fold, 2-fold, 3-fold, 4-fold, 5-fold, 6-fold, 7-fold, 8-fold, 9-fold, 10-fold or more. In some embodiments, the dosage is reduced by greater than or about 10%, 20%, 30%, 40%, 50%, 60%, 70%, 80%, 90%, or more. In some embodiments, the frequency of dosing is reduced, such as the number of daily doses is reduced or the number of days of dosing is reduced.

[0555] C. Agents for Intervention

[0556] In some embodiments, the agent, e.g., toxicity-targeting agent, is an agent that treats and/or that prevents, delays, or attenuates the development of or risk for developing a toxicity following administration of an immunotherapy and/or a cell therapy. In some embodiments, the agent is a steroid, is an antagonist or inhibitor of a cytokine receptor, such as IL-6 receptor, CD122 receptor (IL-2R/IL-15Rbeta receptor), or CCR2, or is an inhibitor of a cytokine, such as IL-6, IL-15, MCP-1, IL-10, IFN-γ, IL-8, or IL-18. In some embodiments, the agent is an agonist of a cytokine receptor and/or cytokine, such as TGF-β. In some embodiments, the agent, e.g., agonist, antagonist or inhibitor, is an antibody or antigen-binding fragment, a small molecule, a protein or peptide, or a nucleic acid. In some embodiments, the agent is an anti-histamine.

[0557] In some embodiments, the intervention includes the use of absorbent resin technology with blood or plasma filtration. In some cases, the intervention includes dialysis, plasmapheresis, or similar technologies.

[0558] In some embodiments, the agent can be administered sequentially, intermittently, or at the same time as or in the same composition as cells for adoptive cell therapy. For example, the agent can be administered before, during, simultaneously with, or after administration of the cell therapy.

[0559] In some embodiments, the agent is administered at a time following administration of cell therapy when the subject has been identified or predicted to be at risk for developing neurotoxicity and/or CRS, such as severe CRS. In some embodiments, the agent is administered at a time following administration of cell therapy when the subject has been identified or predicted to be at risk for developing neurotoxicity and/or CRS, but before physical symptoms of severe neurotoxicity, such as neurotoxicity of grade 3 or above and/or severe CRS, such as a CRS of grade 3 or above, manifest.

[0560] In some embodiments, the agent is administered at a time at which a clinical risk for neurotoxicity and/or CRS is detected to be present following the administration of cell therapy. In some embodiments, the agent is administered at a time at which a biochemical readout evidencing neurotoxicity and/or CRS is detected following administration of cell therapy. In some embodiments, the agent is administered at a time at which a serum level of a factor indicative of neurotoxicity and/or CRS in the subject indicates a higher risk for the development of neurotoxicity and/or CRS as compared to the serum level of the indicator in the subject immediately prior to said administration of the cells. In some embodiments, the agent is administered at a time at which the subject does not exhibit neurotoxicity and/or CRS, does not exhibit severe neurotoxicity and/or CRS, or does not exhibit neurotoxicity and/or CRS above grade 3 following administration of cell therapy.

[0561] In some embodiments, administration of the agent reduces symptoms associated with neurotoxicity and/or CRS compared to other methods. For example, subjects treated with the agent may have reduced symptoms of neurotoxicity, such as limb weakness or numbness, loss of memory, vision, and/or intellect, uncontrollable obsessive and/or compulsive behaviors, delusions, headache, cognitive and behavioral problems including loss of motor control, cognitive deterioration, and autonomic nervous system dysfunction, and sexual dysfunction, compared to subjects who do not receive the agent, or receive the agent at a time when physical symptoms of neurotoxicity have manifested in the subject. In some embodiments, subjects treated with the agent according to the provided methods may have reduced symptoms associated with peripheral motor neuropathy, peripheral sensory neuropathy, dysesthesia, neuralgia or paresthesia.

[0562] In some embodiments, the administration of the agent according to the provided methods reduces outcomes associated with neurotoxicity including damages to the nervous system and/or brain, such as the death of neurons. In some aspects, the administration of the agent reduces the level of factors associated with neurotoxicity such as beta amyloid (Aβ), glutamate, and oxygen radicals.

[0563] In some embodiments, the administration of the agent according to the provided methods reduces outcomes associated with CRS including fever, rigors, chills, hypotension, dyspnea, acute respiratory distress syndrome (ARDS), encephalopathy, ALT/AST elevation, renal failure, cardiac disorders, hypoxia, neurologic disturbances, and death. Neurological complications include delirium, seizure-like activity, confusion, word-finding difficulty, aphasia, and/or becoming obtunded. In some embodiments, the administration of the agent according to the provided methods reduces outcomes associated with CRS including such as fatigue, nausea, headache, seizure, tachycardia, myalgias, rash, acute vascular leak syndrome, liver function impairment, and renal failure. In some embodiments, the administration of the agent according to the provided methods reduces outcomes associated with CRS including such as an increase in one or more factors such as serum-ferritin, d-dimer, aminotransferases, lactate dehydrogenase and triglycerides, or with hypofibrinogenemia or hepatosplenomegaly.

[0564] Thus, in some embodiments, subjects administered the agent that treats, prevents, or reduces the risk of developing neurotoxicity and/or CRS have reduced symptoms, outcomes, or factors associated with neurotoxicity and/or CRS compared to subjects who are not administered the agent, and/or subjects who are administered the agent at a time at which the subject exhibits clinical signs or symptoms of neurotoxicity or severe neurotoxicity, e.g., neurotoxicity of grade 3 or higher and/or severe CRS, such as a CRS of grade 3 or above.

[0565] In some embodiments, the agent can be administered greater than 4 hours, 5 hours, 6 hours, 7 hours, 8 hours, 9 hours, 10 hours, 11 hours, 12 hours, 18 hours, 24 hours, 36 hours, 2 days, 3 days, 4 days, or 5 days or more following administration of the cell therapy. In some of such embodiments, the agent may be administered no later than 5 hours, 6 hours, 7 hours, 8 hours, 9 hours, 10 hours, 11 hours, 12 hours, 18 hours, 24 hours, 36 hours, 2 days, 3 days, 4 days, or 5 days or more following administration of the cell therapy.

[0566] In some aspects, the agent can be administered between or between about 4 hours and 5 days following administration of cell therapy, such as between or between about 4 hours and 4 days, 8 hours and 3 days, 1 day and 3 days, 2 days and 3 days, or 1 day and 2 days following administration of cell therapy. In some such cases, the agent is administered at or about 1 day, at or about 2 days, or at or about 3 days following the administration of cell therapy. In some instances, the subject is treated with the agent within 3 days, within 2 days or within 1 day after administration of the cell therapy.

[0567] In some cases, the agent is administered alone or is administered as part of a composition or formulation, such as a pharmaceutical composition or formulation, as described herein. Thus, the agent alone or as part of a pharmaceutical composition can be administered intravenously or orally, or by any other acceptable known route of administration or as described herein.

[0568] In some embodiments, the dosage of agent or the frequency of administration of the agent in a dosage regimen is reduced compared to the dosage of the agent or its frequency in a method in which a subject is treated with the agent after severe, e.g., grade 3 or higher, neurotoxicity has developed or been diagnosed (e.g. after physical signs or symptoms of grade 3 or higher neurotoxicity has manifested). In some embodiments, the dosage of agent or the frequency of administration of the agent in a dosage regimen is reduced compared to the dosage of the agent or its frequency in a method in which a subject is treated for neurotoxicity greater than 3 days, 4 days, 5 days, 6 days, 1 week 2 weeks, three weeks, or more after administration of the cell therapy. In some embodiments, the dosage is reduced by greater than or about 10%, 20%, 30%, 40%, 50%, 60%, 70%, 80%, 90%, or more. In some embodiments, the frequency of dosing is reduced, such as the number of daily doses is reduced or the number of days of dosing is reduced.

[0569] 1. Steroid

[0570] In some embodiments, the agent that treats neurotoxicity and/or CRS, and/or that prevents, delays, or attenuates the development of or risk for developing severe neurotoxicity is a steroid, e.g., corticosteroid. Corticosteroids typically include glucocorticoids and mineralocorticoids.

[0571] Generally, any corticosteroid, e.g., glucocorticoid, can be used in the methods or compositions provided herein. In some embodiments, glucocorticoids include synthetic and non-synthetic glucocorticoids. Exemplary glucocorticoids include, but are not limited to: alclomethasones, algestones, beclomethasones (e.g. beclomethasone dipropionate), betamethasones (e.g. betamethasone 17-valerate, betamethasone sodium acetate, betamethasone sodium phosphate, betamethasone valerate), budesonides, clobetasols (e.g. clobetasol propionate), clobetasones, clocortolones (e.g. clocortolone pivalate), cloprednols, corticosterones, cortisones and hydrocortisones (e.g. hydrocortisone acetate), cortivazols, deflazacorts, desonides, desoximethasones, dexamethasones (e.g. dexamethasone 21-phosphate, dexamethasone acetate, dexamethasone sodium phosphate), diflorasones (e.g. diflorasone diacetate), diflucortolones, difluprednates, enoxolones, fluazacorts, flucloronides, fludrocortisones (e.g., fludrocortisone acetate), flumethasones (e.g. flumethasone pivalate), flunisolides, fluocinolones (e.g. fluocinolone acetonide), fluocinonides, fluocortins, fluocortolones, fluorometholones (e.g. fluorometholone acetate), fluperolones (e.g., fluperolone acetate), fluprednidenes, fluprednisolones, flurandrenolides, fluticasones (e.g. fluticasone propionate), formocortals, halcinonides, halobetasols, halometasones, halopredones, hydrocortamates, hydrocortisones (e.g. hydrocortisone 21-butyrate, hydrocortisone aceponate, hydrocortisone acetate, hydrocortisone buteprate, hydrocortisone butyrate, hydrocortisone cypionate, hydrocortisone hemisuccinate, hydrocortisone probutate, hydrocortisone sodium phosphate, hydrocortisone sodium succinate, hydrocortisone valerate), loteprednol etabonate, mazipredones, medrysones, meprednisones, methylprednisolones (methylprednisolone aceponate, methylprednisolone acetate, methylprednisolone hemisuccinate, methylprednisolone sodium succinate), mometasones (e.g., mometasone furoate), paramethasones (e.g., paramethasone acetate), prednicarbates, prednisolones (e.g. prednisolone 25-diethylaminoacetate, prednisolone sodium phosphate, prednisolone 21-hemisuccinate, prednisolone acetate; prednisolone farnesylate, prednisolone hemisuccinate, prednisolone-21 (beta-D-glucuronide), prednisolone metasulphobenzoate, prednisolone steaglate, prednisolone tebutate, prednisolone tetrahydrophthalate), prednisones, prednivals, prednylidenes, rimexolones, tixocortols, triamcinolones (e.g. triamcinolone acetonide, triamcinolone benetonide, triamcinolone hexacetonide, triamcinolone acetonide 21-palmitate, triamcinolone diacetate). These glucocorticoids and the salts thereof are discussed in detail, for example, in Remington's Pharmaceutical Sciences, A. Osol, ed., Mack Pub. Co., Easton, Pa. (16th ed. 1980).

[0572] In some examples, the glucocorticoid is selected from among cortisones, dexamethasones, hydrocortisones, methylprednisolones, prednisolones and prednisones. In a particular example, the glucocorticoid is dexamethasone.

[0573] In some embodiments, the agent is a corticosteroid and is administered in an amount that is therapeutically effective to treat, ameliorate or reduce one or more symptoms of neurotoxicity and/or CRS. In some embodiments, indicators of improvement or successful pretreatment include determination of the failure to manifest a relevant score on neurotoxicity and/or CRS grading scale, such as a score of less than 3, or a change in grading or severity on the neurotoxicity and/or CRS grading scale as discussed herein, such as a change from a score of 4 to a score of 3.

[0574] In some aspects, the corticosteroid is provided in a therapeutically effective dose. Therapeutically effective concentration can be determined empirically by testing in known in vitro or in vivo (e.g. animal model) systems. For example, the amount of a selected corticosteroid to be administered to ameliorate symptoms or adverse effects of neurotoxicity and/or CRS can be determined by standard clinical techniques. In addition, animal models can be employed to help identify optimal dosage ranges. The precise dosage, which can be determined empirically, can depend on the particular therapeutic preparation, the regime and dosing schedule, the route of administration and the seriousness of the disease.

[0575] The corticosteroid can be administered in any amount that is effective to ameliorate one or more symptoms associated with neurotoxicity and/or CRS. Thus, the corticosteroid, e.g., glucocorticoid, can be administered, for example, at an amount between at or about 0.1 and 100 mg, per dose, 0.1 to 80 mg, 0.1 to 60 mg, 0.1 to 40 mg, 0.1 to 30 mg, 0.1 to 20 mg, 0.1 to 15 mg, 0.1 to 10 mg, 0.1 to 5 mg, 0.2 to 40 mg, 0.2 to 30 mg, 0.2 to 20 mg, 0.2 to 15 mg, 0.2 to 10 mg, 0.2 to 5 mg, 0.4 to 40 mg, 0.4 to 30 mg, 0.4 to 20 mg, 0.4 to 15 mg, 0.4 to 10 mg, 0.4 to 5 mg, 0.4 to 4 mg, 1 to 20 mg, 1 to 15 mg or 1 to 10 mg, to a 70 kg adult human subject. Typically, the corticosteroid, such as a glucocorticoid is administered at an amount between at or about 0.4 and 20 mg, for example, at or about 0.4 mg, 0.5 mg, 0.6 mg, 0.7 mg, 0.75 mg, 0.8 mg, 0.9 mg, 1 mg, 2 mg, 3 mg, 4 mg, 5 mg, 6 mg, 7 mg, 8 mg, 9 mg, 10 mg, 11 mg, 12 mg, 13 mg, 14 mg, 15 mg, 16 mg, 17 mg, 18 mg, 19 mg or 20 mg per dose, to an average adult human subject.

[0576] In some embodiments, the corticosteroid can be administered, for example, at a dosage of at or about 0.001 mg/kg (of the subject), 0.002 mg/kg, 0.003 mg/kg, 0.004 mg/kg, 0.005 mg/kg, 0.006 mg/kg, 0.007 mg/kg, 0.008 mg/kg, 0.009 mg/kg, 0.01 mg/kg, 0.015 mg/kg, 0.02 mg/kg, 0.025 mg/kg, 0.03 mg/kg, 0.035 mg/kg, 0.04 mg/kg, 0.045 mg/kg, 0.05 mg/kg, 0.055 mg/kg, 0.06 mg/kg, 0.065 mg/kg, 0.07 mg/kg, 0.075 mg/kg, 0.08 mg/kg, 0.085 mg/kg, 0.09 mg/kg, 0.095 mg/kg, 0.1 mg/kg, 0.15 mg/kg, 0.2 mg/kg, 0.25 mg/kg, 0.30 mg/kg, 0.35 mg/kg, 0.40 mg/kg, 0.45 mg/kg, 0.50 mg/kg, 0.55 mg/kg, 0.60 mg/kg, 0.65 mg/kg, 0.70 mg/kg, 0.75 mg/kg, 0.80 mg/kg, 0.85 mg/kg, 0.90 mg/kg, 0.95 mg/kg, 1 mg/kg, 1.05 mg/kg, 1.1 mg/kg, 1.15 mg/kg, 1.20 mg/kg, 1.25 mg/kg, 1.3 mg/kg, 1.35 mg/kg or 1.4 mg/kg, to an average adult human subject, typically weighing about 70 kg to 75 kg.

[0577] The corticosteroid, or glucocorticoid, for example dexamethasone, can be administered orally (tablets, liquid or liquid concentrate), PO, intravenously (IV), intramuscularly or by any other known route or route described herein (e.g., with respect to pharmaceutical formulations). In some aspects, the corticosteroid is administered as a bolus, and in other aspects it may be administered over a period of time.

[0578] In some aspects, the glucocorticoid can be administered over a period of more than one day, such as over two days, over 3 days, or over 4 or more days. In some embodiments, the corticosteroid can be administered one per day, twice per day, or three times or more per day. For example, the corticosteroid, e.g., dexamethasone, may in some examples be administered at 10 mg (or equivalent) IV twice a day for three days.

[0579] In some embodiments, the dosage of corticosteroid, e.g., glucocorticoid, is administered in successively lower dosages per treatment. Hence, in some such treatment regimes, the dose of corticosteroid is tapered. For example, the corticosteroid may be administered at an initial dose (or equivalent dose, such as with reference to dexamethasone) of 4 mg, and upon each successive administration the dose may be lowered, such that the dose is 3 mg for the next administration, 2 mg for the next administration, and 1 mg for the next administration.

[0580] Generally, the dose of corticosteroid administered is dependent upon the specific corticosteroid, as a difference in potency exists between different corticosteroids. It is typically understood that drugs vary in potency, and that doses can therefore vary, in order to obtain equivalent effects. Table 6B shows equivalence in terms of potency for various glucocorticoids and routes of administration. Equivalent potency in clinical dosing is well known. Information relating to equivalent steroid dosing (in a non-chronotherapeutic manner) may be found in the British National Formulary (BNF), 37 March 1999.

TABLE 6B
Glucocorticoid administration

| Glucocorticoid (Route) | Equivalency Potency |
|---|---|
| Hydrocortisone (IV or PO) | 20 |
| Prednisone | 5 |
| Prednisolone (IV or PO) | 5 |
| Methylprednisolone sodium succinate (IV) | 4 |
| Dexamethasone (IV or PO) | 0.5-0.75 |

[0581] Thus, in some embodiments, the steroid is administered in an equivalent dosage amount of from or from about 1.0 mg to 20 mg dexamethasone per day, such as 1.0 mg to 15 mg dexamethasone per day, 1.0 mg to 10 mg dexamethasone per day, 2.0 mg to 8 mg dexamethasone per day, or 2.0 mg to 6.0 mg dexamethasone per day, each inclusive. In some cases, the steroid is administered in an equivalent dose of at or about 4 mg or at or about 8 mg dexamethasone per day.

[0582] In some embodiments, the steroid is administered if fever persists after treatment with tocilizumab. For example, in some embodiments, dexamethasone is administered orally or intravenously at a dosage of 5-10 mg up to every 6-12 hours with continued fevers. In some embodiments, tocilizumab is administered concurrently with or subsequent to oxygen supplementation.

[0583] 2. Inhibitors of Microglial Cell Activity

[0584] In some embodiments, the agent is an inhibitor of a microglial cell activity. In some embodiments, the administration of the inhibitor modulates the activity of microglia. In some embodiments, the inhibitor is an antagonist that inhibits the activity of a signaling pathway in microglia. In some embodiments, the microglia inhibitor affects microglial homeostasis, survival, and/or proliferation. In some embodiments, the inhibitor targets the CSF1R signaling pathway. In some embodiments, the inhibitor is an inhibitor of CSF1R. In some embodiments, the inhibitor is a small molecule. In some cases, the inhibitor is an antibody.

[0585] In some aspects, administration of the inhibitor results in one or more effects selected from an alteration in microglial homeostasis and viability, a decrease or blockade of microglial cell proliferation, a reduction or elimination of microglial cells, a reduction in microglial activation, a reduction in nitric oxide production from microglia, a reduction in nitric oxide synthase activity in microglia, or protection of motor neurons affected by microglial activation. In some embodiments, the agent alters the level of a serum or blood biomarker of CSF1R inhibition, or a decrease in the level of urinary collagen type 1 cross-linked N-telopeptide (NTX) compared to at a time just prior to initiation of the administration of the inhibitor. In some embodiments, the administration of the agent transiently inhibits the activity of microglia activity and/or wherein the inhibition of microglia activity is not permanent. In some embodiments, the administration of the agent transiently inhibits the activity of CSF1R and/or wherein the inhibition of CSF1R activity is not permanent.

[0586] In some embodiments, the agent that reduces microglial cell activity is a small molecule, peptide, protein, antibody or antigen-binding fragment thereof, an antibody mimetic, an aptamer, or a nucleic acid molecule. In some embodiments, the method involves administration of an inhibitor of microglia activity. In some embodiments, the agent is an antagonist that inhibits the activity of a signaling pathway in microglia. In some embodiments, the agent that reduces microglial cell activity affects microglial homeostasis, survival, and/or proliferation.

[0587] In some embodiments, the agent that reduces microglial cell activation is selected from an anti-inflammatory agent, an inhibitor of NADPH oxidase (NOX2), a calcium channel blocker, a sodium channel blocker, inhibits GM-CSF, inhibits CSF1R, specifically binds CSF-1, specifically binds IL-34, inhibits the activation of nuclear factor kappa B (NF-KB), activates a CB₂ receptor and/or is a CB₂ agonist, a phosphodiesterase inhibitor, inhibits microRNA-155 (miR-155), upregulates microRNA-124 (miR-124), inhibits nitric oxide production in microglia, inhibits nitric oxide synthase, or activates the transcription factor NRF2 (also called nuclear factor (erythroid-derived 2)-like 2, or NFE2L2).

[0588] In some embodiments, the agent that reduces microglial cell activity targets CSF1 (also called macrophage colony-stimulating factor MCSF). In some embodiments, the agent that reduces microglial cell activity affects MCSF-stimulated phosphorylation of the M-CSF receptor (Pryer et al. Proc Am Assoc Cancer Res, AACR Abstract nr DDT02-2 (2009)). In some cases, the agent that reduces microglial cell activity is MCS110 (international patent application publication number WO2014001802; Clinical Trial Study Record Nos.:A1 NCT00757757; NCT02807844; NCT02435680; NCT01643850).

[0589] In some embodiments, the agent that reduces microglial cell activity is a small molecule that targets the CSF1 pathway. In some embodiments, the agent is a small molecule that binds CSF1R. In some embodiments, the agent is a small molecule which inhibits CSF1R kinase activity by competing with ATP binding to CSF1R kinase. In some embodiments, the agent is a small molecule which inhibits the activation of the CFS1R receptor. In some cases, the binding of the CSF-1 ligand to the CSF1R is inhibited. In some embodiments, the agent that reduces microglial cell activity is any of the inhibitors described in US Patent Application Publication Number US20160032248.

[0590] In some embodiments, the agent is a small molecule inhibitor selected from PLX-3397, PLX7486, JNJ-40346527, JNJ28312141, ARRY-382, PLX73086 (AC-708), DCC-3014, AZD6495, GW2580, Ki20227, BLZ945, PLX647, PLX5622. In some embodiments, the agent is any of the inhibitors described in Conway et al., Proc Natl Acad Sci USA, 102(44):16078-83 (2005); Dagher et al., Journal of Neuroinflammation, 12:139 (2015); Ohno et al., Mol Cancer Ther. 5(11):2634-43 (2006); von Tresckow et al., Clin Cancer Res.,21(8) (2015); Manthey et al. Mol Cancer Ther. (8(11):3151-61 (2009); Pyonteck et al., Nat Med. 19(10): 1264-1272 (2013); Haegel et al., Cancer Res AACR Abstract nr 288 (2015); Smith et al., Cancer Res AACR Abstract nr 4889 (2016); Clinical Trial Study Record Nos.: NCT01525602; NCT02734433; NCT02777710; NCT01804530; NCT01597739; NCT01572519; NCT01054014; NCT01316822; NCT02880371; NCT02673736; international patent application publication numbers WO2008063888A2, WO2006009755A2, US patent application publication numbers US20110044998, US 2014/0065141, and US 2015/0119267.

[0591] In some embodiments, the agent that reduces microglial cell activity is 4-((2-(((1R,2R)-2-hydroxycyclohexyl)amino)benzo[d]thiazol-6-yl)oxy)-N-methylpicolinamide (BLZ945) or a pharmaceutically acceptable salt thereof or derivatives thereof. In some embodiments, the agent is the following compound:

[chemical structure]

wherein R1 is an alkyl pyrazole or an alkyl carboxamide, and R2 is a hydroxycycloalkyl or a pharmaceutically acceptable salt thereof.

[0592] In some embodiments, the agent that reduces microglial cell activity is 5-((5-chloro-1H-pyrrolo[2,3-b]pyridin-3-yl)methyl)-N-((6-(trifluoromethyl)pyridin-3-yl)methyl)pyridin-2-amine, N-[5-[(5-Chloro-1H-pyrrolo[2,3-b]pyridin-3-yl)methyl]−2-pyridinyl]−6-(trifluoromethyl)-3-pyridinemethanamine) (PLX 3397) or a pharmaceutically acceptable salt thereof or derivatives thereof. In some embodiments, the agent is 5-(1H-Pyrrolo[2,3-b]pyridin-3-ylmethyl)-N-[[4-(trifluoromethyl)phenyl]methyl]−2-pyridinamine dihydrochloride (PLX647) or a pharmaceutically acceptable salt thereof or derivatives thereof. In some embodiments, the agent that reduces microglial cell activity is the following compound:

[chemical structure]

or a pharmaceutically acceptable salt thereof. In some embodiments, the agent that reduces microglial cell activity is the following compound:

[chemical structure]

or a pharmaceutically acceptable salt thereof. In some embodiments, the agent is any of the inhibitors described in US patent number U.S. Pat. No. 7,893,075.

[0593] In some embodiments, the agent that reduces microglial cell activity is 4-cyano-N-[2-(1-cyclohexen-l-yl)-4-[1-[(dimethylamino)acetyl]−4-piperidinyl]phenyl]−1H-imidazole-2-carboxamide monohydrochloride (JNJ28312141) or a pharmaceutically acceptable salt thereof or derivatives thereof. In some embodiments, the agent is the following compound:

[chemical structure]

or a pharmaceutically acceptable salt thereof. In some embodiments, the agent is any of the inhibitors described in US patent number U.S. Pat. No. 7,645,755.

[0594] In some embodiments, the agent that reduces microglial cell activity is 1H-Imidazole-2-carboxamide, 5-cyano-N-(2-(4,4-dimethyl-l-cyclohexen-l-yl)-6-(tetrahydro-2,2,6,6-tetramethyl-2H-pyran-4-yl)-3-pyridinyl)-, 4-Cyano-1H-imidazole-2-carboxylic acid N-(2-(4,4-dimethylcyclohex-1-enyl)-6-(2,2,6,6-tetramethyltetrahydropyran-4-yl)pyridin-3-yl)amide, 4-Cyano-N-(2-(4,4-dimethylcyclohex-1-en-1-yl)-6-(2,2,6,6-tetramethyl-tetrahydro-2H-pyran-4-yl)pyridin-3-yl)-1H-imidazole-2-carboxamide (JNJ-40346527) or a pharmaceutically acceptable salt thereof or derivatives thereof. In some embodiments, the agent is the following compound:

[chemical structure]

or a pharmaceutically acceptable salt thereof.

[0595] In another embodiment, the agent that reduces microglial cell activity is 5-(3-Methoxy-4-((4-methoxybenzyl)oxy)benzyl)pyrimidine-2,4-diamine (GW2580) or a pharmaceutically acceptable salt thereof or derivatives thereof. In some embodiments, the agent is the following compound:

[chemical structure]

or a pharmaceutically acceptable salt thereof (international patent application publication number WO2009099553).

[0596] In some embodiments, the agent that reduces microglial cell activity is 4-(2,4-difluoroanilino)-7-ethoxy-6-(4-methylpiperazin-l-yl)quinoline-3-carboxamide (AZD6495) or a pharmaceutically acceptable salt thereof or derivatives thereof. In some embodiments, the agent is the following compound:

[chemical structure]

or a pharmaceutically acceptable salt thereof.

[0597] In some embodiments, the agent that reduces microglial cell activity is N-{4-[(6,7-dimethoxy-4-quinolyl)oxy]-2-methoxyphenyl}-N0-[1-(1,3-thiazole-2-yl)ethyl]urea (Ki20227) or a pharmaceutically acceptable salt thereof or derivatives thereof. In some embodiments, the agent is the following compound:

[chemical structure]

or a pharmaceutically acceptable salt thereof.

[0598] In some embodiments, the agent that reduces microglial cell activation is an antibody that targets the CSF1 pathway. In some embodiments, the agent is an antibody that binds CSF1R. In some embodiments, the anti-CSF1R antibody blocks CSF1R dimerization. In some embodiments, the anti-CSF1R antibody blocks the CSF1R dimerization interface that is formed by domains D4 and D5 (Ries et al. Cancer Cell 25(6):846-59 (2014)). In some cases, the agent is selected from emactuzumab (RG7155; R05509554), Cabiralizumab (FPA-008), LY-3022855 (IMC-CS4), AMG-820, TG-3003, MCS110, H27K15, 12-2D6, 2-4A5 (Rovida and Sbarba, J Clin Cell Immunol.6:6 (2015); Clinical Trial Study Record Nos.: NCT02760797; NCT01494688; NCT02323191; NCT01962337; NCT02471716; NCT02526017; NCT01346358; NCT02265536; NCT01444404; NCT02713529, NCT00757757; NCT02807844; NCT02435680; NCT01643850).

[0599] In some embodiments, the agent that reduces microglial cell activation is a tetracycline antibiotic. For example, the agent affects IL-lb, IL-6, TNFa, or iNOS concentration in microglia cells (Yrjänheikki et al. PNAS 95(26): 15769-15774 (1998); Clinical Trial Study Record No: NCT01120899). In some embodiments, the agent is an opioid antagonist (Younger et al. Pain Med. 10(4):663-672 (2009.) In some embodiments, the agent reduces glutamatergic neurotransmission (U.S. Pat. No. 5,527,814). In some embodiments, the agent modulates NFkB signaling (Valera et al J. Neuroinflammation 12:93 (2015); Clinical Trial Study Record No: NCT00231140). In some embodiments, the agent targets cannabinoid receptors (Ramírez et al. J. Neurosci 25(8):1904-13(2005)). In some embodiments, the agent is selected from minocycline, naloxone, riluzole, lenalidomide, and a cannabinoid (optionally WIN55 or 212-2).

[0600] Nitric oxide production from microglia is believed, in some cases, to result in or increase neurotoxicity. In some embodiments, the agent modulates or inhibits nitric oxide production from microglia. In some embodiments, the agent inhibits nitric oxide synthase (NOS). In some embodiments, the NOS inhibitor is Ronopterin (VAS-203), also known as 4-amino-tetrahydrobiopterin (4-ABH4). In some embodiments, the NOS inhibitor is cindunistat, A-84643, ONO-1714, L-NOARG, NCX-456, VAS-2381, GW-273629, NXN-462, CKD-712, KD-7040, or guanidinoethyldisulfide. In some embodiments, the agent is any of the inhibitors described in Ming et al., Cell Stem Cell. 2012 Nov. 2;11(5):620-32.

[0601] In some embodiments, the agent blocks T cell trafficking, such as to the central nervous system. In some embodiments, blocking T cell trafficking can reduce or prevent immune cells from crossing blood vessel walls into the central nervous system, including crossing the blood-brain barrier. In some cases, activated antigen-specific T cells produce proinflammatory cytokines, including IFN-γ and TNF, upon reactivation in the CNS, leading to activation of resident cells such as microglia and astrocytes. See Kivisäkk et al., Neurology. 2009 Jun. 2; 72(22): 1922-1930. Thus, in some embodiments, sequestering activated T cells from microglial cells, such as by blocking trafficking and/or inhibiting the ability of such cells to cross the blood-brain barrier, can reduce or eliminate microglial activation. In some embodiments, the agent inhibits adhesion molecules on immune cells, including T cells. In some embodiments, the agent inhibits an integrin. In some embodiments, the integrin is alpha-4 integrin. In some embodiments, the agent is natalizumab (Tysabri®). In some embodiments, the agent modulates a cell surface receptor. In some embodiments, the agent modulates the sphingosine-1-phosphate (S1P) receptor, such as S1PR1 or S1PR5. In some embodiments, the agent causes the internalization of a cellular receptor, such as a sphingosine-1-phosphate (S1P) receptor, such as S1PR1 or S1PR5. In some embodiments, the agent is fingolimod (Gilenya®) or ozanimod (RPC-1063).

[0602] The transcription factor NRF2 is believed to regulate the anti-oxidant response, for example, by turning on genes that contain a cis-acting element in their promoter region. An example of such an element includes an antioxidant response element (ARE). In some embodiments, the agent activates NRF2. In some embodiments, activating NRF2 in microglial cells reduces the microglial cells' responsiveness to IFN and LPS. In some embodiments, activating NRF2 inhibits, slows, or reduces demyelination, axonal loss, neuronal death, and/or oligodendrocyte death. In some embodiments, the agent upregulates the cellular cytoprotective pathway regulated by NRF2. In some embodiments, the agent that activates NRF2 is dimethyl fumarate (Tecfidera®). In some embodiments, the agent is any of the inhibitors described in U.S. Pat. No. 8,399,514. In some embodiments, the agent is any of the inhibitors described in Hoing et al., Cell Stem Cell. 2012 Nov 2;11(5):620-32.

[0603] In some embodiments, the agent that reduces microglial cell activation is (4S,4aS,5aR,12aS)-4,7-bis(dimethylamino)-3,10,12,12a-tetrahydroxy-1,11-dioxo-1,4,4a,5,5a,6,11,12a-octahydrotetracene-2-carboxamide (Minocycline) or a pharmaceutically acceptable salt thereof or derivatives thereof. In some embodiments, the agent is any of the compounds described in US patent application publication number US20100190755. In some embodiments, the agent is the following compound:

[chemical structure]

or a pharmaceutically acceptable salt thereof.

[0604] In some embodiments, the agent that reduces microglial cell activation is 3-(7-amino-3-oxo-1H-isoindol-2-yl)piperidine-2,6-dione (lenalidomide) or a pharmaceutically acceptable salt thereof or derivatives thereof. In some embodiments, the agent is the following compound:

[chemical structure]

or a pharmaceutically acceptable salt thereof.

[0605] In some embodiments, the agent that reduces microglial cell activation is 4R,4aS,7aR,12bS)-4a,9-dihydroxy-3-prop-2-enyl-2,4,5,6,7a,13-hexahydro-1H-4,12-methanobenzofuro[3,2-e]isoquinoline-7-one (naloxone) or a pharmaceutically acceptable salt thereof or derivatives thereof. In some embodiments, the agent is any of the compounds described in US patent number U.S. Pat. No. 8,247,425. In some embodiments, the agent is the following compound:

[chemical structure]

or a pharmaceutically acceptable salt thereof.

[0606] In some embodiments, the agent that reduces microglial cell activation is 2-amino-6-(trifluoromethoxy)benzothiazole, 6-(trifluoromethoxy)benzo[d]thiazol-2-amine, or 6-(trifluoromethoxy)-1,3-benzothiazol-2-amine (riluzole) or a pharmaceutically acceptable salt thereof or derivatives thereof as described in US patent number U.S. Pat. No. 5,527,814. In some embodiments, the agent is the following compound:

[chemical structure]

or a pharmaceutically acceptable salt thereof.

[0607] In some embodiments, the agent that reduces microglial cell activation is a modulator of a signaling pathway in microglia. In some cases, the agent reduces microglia singling. In some embodiments, the agent is a GM-CSF (CSF2) inhibitor. In other embodiments, the agent that reduces microglial cell activation is an ion channel blocker. In some specific embodiments, the agent is a calcium channel blocker. For example, in some specific examples, the agent is a dihydropyridine calcium channel blocker. In some embodiments, the agent is a microRNA inhibitor. For example, the agent targets miR-155. In some embodiments, the agent that reduces microglial cell activation is selected from MOR103, Nimodipine, IVIg, and LNA-anti-miR-155 (Butoxsky et al. Ann Neurol., 77(1):75-99 (2015) and Sanz et al., Br J Pharmacol. 167(8): 1702-1711 (2012); Winter et al., Ann Clin and Transl Neurol. 2328-9503 (2016); Clinical Trial Study Record Nos.: NCT01517282, NCT00750867).

[0608] In some embodiments, the agent that reduces microglial cell activation is 3-(2-methoxyethyl) 5-propan-2-yl 2,6-dimethyl-4-(3-nitrophenyl)-1,4-dihydropyridine-3,5-dicarboxylate (nimodipine) or a pharmaceutically acceptable salt thereof or derivatives thereof. In some embodiments, the agent is any of the inhibitors described in US patent number U.S. Pat. No. 3,799,934. In some embodiments, the agent is the following compound:

[chemical structure]

or a pharmaceutically acceptable salt thereof.

[0609] In some cases, the agent that reduces microglial cell activation is administered in a form that only affects to central nervous system and/or does not affect tumor-associated macrophages. In some embodiments, the agent promotes microglia quiescence but does not eliminate or reduce the number of microglia. In some embodiments, the method involves inhibiting microglia activity specifically in the brain such as described in Ponomarev et al., Nature Medicine, (1):64-70 (2011)

[0610] Exemplary agents that reduce microglial cell activation, and exemplary dosing regimens for administering such agents, are set forth in Table 7 below.

TABLE 7
Exemplary microglia inhibitors and dosage regimens

| Exemplary | Type of | Molecular | |
|---|---|---|---|
| Inhibitor | Molecule | Target(s) | Exemplary Dosing Regimen(s) |
| Pexidartinib | small molecule | CSF1R; c-Kit; | 200 mg tablets, twice daily for 28 days; |
| (PLX3397) | | FET3 | Administer daily as split dose regimen, |
| | | | five dose-levels possible in dose |
| | | | escalation part: 400 mg 5 days on 2 days |
| | | | off (intermittent schedule), 400 mg, 600 |
| | | | mg, 800 mg or 1000 mg; 1000 mg/day |
| | | | for 2 weeks then 800 mg/day for 22 |
| | | | weeks |
| Emactuzumab | monoclonal | CSF1R | 100-3000 mg once every 2 weeks |
| (RG1755; | antibody | | |
| RO5509554) | | | |
| Cabiralizumab | antibody | CSF1R | Intravenous infusion over 30 minutes |
| (FPA-008) | | | every 2 weeks |
| LY-3022855 | monoclonal | CSF1R | 1.25 mg/kg intravenous delivery every 2 |
| (IMC-CS4) | antibody | | weeks for 6 weeks |
| JNJ-40346527 | small molecule | CSF1R | 100 mg twice daily for 12 weeks; 100- |
| | | | 1000 mg capsule daily |
| MCS110 | antibody | MCSF (CSF1) | Up to 4 doses of 10 mg/kg MCS110 |
| | | | administered intravenously once every 4 |
| | | | weeks starting at Day 1 |
| MOR103 | antibody | GM-CSF | 6 doses of 0.5-2.0 mg/kg over 70 days |
| IVIg | immunoglobulin | Unknown | Intravenous infusion of 0.4 g/kg each |
| | | | month for 6 months |
| Minocyline | small molecule | broad spectrum | Oral dose of 100 mg of minocycline |
| | | antibiotic: IL-1b; | twice daily for 24 months |
| | | IL-6, TNF-a; | |
| | | iNOS | |
| Naloxone | small molecule | Opioid receptors | 4.5 mg naltrexone hydrochloride |
| | | | capsules once/day for 8 weeks |
| Lenalidomide/thalidomide | small molecule | NFkB signaling | 100-400 mg daily |
| Riluzole | small molecule | Glutamate release | 50 mg twice daily |
| | | by microglia | |
| Cannabinoids/ | small molecule | cannabinoid | Orally 10 mg/kg/day for 6 weeks |
| cannabidiol | | receptors | (average of 700 mg/day) |
| (e.g. WIN55, 212-2) | | | |
| Dimethyl | small molecule | Nrf2 signaling | Starting dose of 120 mg taken orally |
| fumarate | | | twice/day for 7 days. Dose increased to |
| (Tecfidera ®). | | | 240 mg taken orally twice/day thereafter |
| natalizumab | antibody | alpha-4 integrin | 300 mg infused intravenously over |
| (Tysabri ®) | | | one hour, every four weeks |
| fingolimod | small molecule | S1P receptors, | 0.5 mg orally once-daily |
| (Gilenya ®) | | including | |
| | | S1PR1 | |
| ozanimod | small molecule | S1PR1 and | 0.25 mg, 0.5 mg, or 1 mg once daily |
| (RPC-1063) | | S1PR5 | |

[0611] 3. Other Agents

[0612] In some embodiments, the agent or other treatment that treats or ameliorates symptoms of a toxicity of immunotherapy and/or a cell therapy, such as CRS or neurotoxicity, is one that targets a cytokine, e.g., is an antagonist or inhibitor of a cytokine, such as transforming growth factor beta (TGF-beta), interleukin 6 (IL-6), interleukin 10 (IL-10), IL-2, MIP1β (CCL4), TNF-alpha, IL-1, interferon gamma (IFN-gamma), or monocyte chemoattractant protein-1 (MCP-1). In some embodiments, the agent that treats or ameliorates symptoms of a toxicity of an immunotherapy and/or a cell therapy, such as CRS or neurotoxicity, is one that targets (e.g. inhibits or is an antagonist of) a cytokine receptor, such as IL-6 receptor (IL-6R), IL-2 receptor (IL-2R/CD25), MCP-1 (CCL2) receptor (CCR2 or CCR4), a TGF-beta receptor (TGF-beta I, II, or III), IFN-gamma receptor (IFNGR), MIP1β receptor (e.g., CCR5), TNF-alpha receptor (e.g., TNFR1), IL-1 receptor (IL1-Rα/IL-1Rβ), or IL-10 receptor (IL-10R).

[0613] The amount of a selected agent that treats or ameliorates symptoms of a toxicity of an immunotherapy and/or a cell therapy, such as CRS or neurotoxicity following administration of be administered to ameliorate symptoms or adverse effects of a toxicity following administration of an immunotherapy and/or a cell therapy, such as CRS or neurotoxicity, can be determined by standard clinical techniques. Exemplary adverse events include, but are not limited to, an increase in alanine aminotransferase, an increase in aspartate aminotransferase, chills, febrile neutropenia, headache, hypotension, left ventricular dysfunction, encephalopathy, hydrocephalus, seizure, and/or tremor.

[0614] In some embodiments, the agent is administered in a dosage amount of from or from about 30 mg to 5000 mg, such as 50 mg to 1000 mg, 50 mg to 500 mg, 50 mg to 200 mg, 50 mg to 100 mg, 100 mg to 1000 mg, 100 mg to 500 mg, 100 mg to 200 mg, 200 mg to 1000 mg, 200 mg to 500 mg or 500 mg to 1000 mg.

[0615] In some embodiments, the agent is administered from or from about 0.5 mg/kg to 100 mg/kg, such as from or from about 1 mg/kg to 50 mg/kg, 1 mg/kg to 25 mg/kg, 1 mg/kg to 10 mg/kg, 1 mg/kg to 5 mg/kg, 5 mg/kg to 100 mg/kg, 5 mg/kg to 50 mg/kg, 5 mg/kg to 25 mg/kg, 5 mg/kg to 10 mg/kg, 10 mg/kg to 100 mg/kg, 10 mg/kg to 50 mg/kg, 10 mg/kg to 25 mg/kg, 25 mg/kg to 100 mg/kg, 25 mg/kg to 50 mg/kg to 50 mg/kg to 100 mg/kg. In some embodiments, the agent is administered in a dosage amount of from or from about 1 mg/kg to 10 mg/kg, 2 mg/kg to 8 mg/kg, 2 mg/kg to 6 mg/kg, 2 mg/kg to 4 mg/kg or 6 mg/kg to 8 mg/kg, each inclusive. In some aspects, the agent is administered in a dosage amount of at least or at least about or about 1 mg/kg, 2 mg/kg, 4 mg/kg, 6 mg/kg, 8 mg/kg, 10 mg/kg or more. In some embodiments, the agent is administered at a dose of 4 mg/kg or 8 mg/kg.

[0616] In some embodiments, the agent is administered by injection, e.g., intravenous or subcutaneous injections, intraocular injection, periocular injection, subretinal injection, intravitreal injection, trans-septal injection, sub-scleral injection, intra-choroidal injection, intra-cameral injection, sub-conjunctival injection, sub-conjunctival injection, sub-Tenon's injection, retro-bulbar injection, peri-bulbar injection, or posterior juxta-scleral delivery. In some embodiments, they are administered by parenteral, intrapulmonary, and intranasal, and, if desired for local treatment, intra-lesional administration. Parenteral infusions include intramuscular, intravenous, intraarterial, intraperitoneal, or subcutaneous administration.

[0617] In some embodiments, the amount of the agent is administered about or approximately twice daily, daily, every other day, three times a week, weekly, every other week or once a month.

[0618] In some embodiments, the agent is administered as part of a composition or formulation, such as a pharmaceutical composition or formulation as described below. Thus, in some cases, the composition comprising the agent is administered as described below. In other aspects, the agent is administered alone and may be administered by any known acceptable route of administration or by one described herein, such as with respect to compositions and pharmaceutical formulations.

[0619] In some embodiments, the agent that treats or ameliorates symptoms of a toxicity of the immunotherapy and/or cell therapy, such as CRS or neurotoxicity, is an antibody or antigen binding fragment. In some embodiments, the agent is tocilizumab, siltuximab, sarilumab, olokizumab (CDP6038), elsilimomab, ALD518/BMS-945429, sirukumab (CNTO 136), CPSI-2634, ARGX-109, FE301, or FM101.

[0620] In some embodiments, the agent is an antagonist or inhibitor of IL-6 or the IL-6 receptor (IL-6R). In some aspects, the agent is an antibody that neutralizes IL-6 activity, such as an antibody or antigen-binding fragment that binds to IL-6 or IL-6R. For example, in some embodiments, the agent is or comprises tocilizumab (atlizumab) or sarilumab, anti-IL-6R antibodies. In some embodiments, the agent is an anti-IL-6R antibody described in U.S. Pat. No: 8,562,991. In some cases, the agent that targets IL-6 is an anti-IL-6 antibody, such as siltuximab, elsilimomab, ALD518/BMS-945429, sirukumab (CNTO 136), CPSI-2634, ARGX-109, FE301, FM101, or olokizumab (CDP6038). In some aspects, the agent may neutralize IL-6 activity by inhibiting the ligand-receptor interactions. The feasibility of this general type of approach has been demonstrated with a natural occurring receptor antagonist for interleukin-1. See Harmurn, C. H. et al., Nature (1990) 343:336-340. In some aspects, the IL-6/IL-6R antagonist or inhibitor is an IL-6 mutein, such as one described in U.S. Pat. No. 5591827. In some embodiments, the agent that is an antagonist or inhibitor of IL-6/IL-6R is a small molecule, a protein or peptide, or a nucleic acid.

[0621] In some embodiments, the agent is tocilizumab. In some embodiments, tocilizumab is administered as an early intervention in accord with the provided methods a dosage of from or from about 1 mg/kg to 12 mg/kg, such as at or about 4 mg/kg, 8 mg/kg, or 10 mg/kg. In some embodiments, tocilizumab is administered by intravenous infusion. In some embodiments, tocilizumab is administered for a persistent fever of greater than 39° C. lasting 10 hours that is unresponsive to acetaminophen. In some embodiments, a second administration of tocilizumab is provided if symptoms recur after 48 hours of the initial dose.

[0622] In some embodiments, the agent is an agonist or stimulator of TGF-β or a TGF-β receptor (e.g., TGF-β receptor I, II, or III). In some aspects, the agent is an antibody that increases TGF-β activity, such as an antibody or antigen-binding fragment that binds to TGF-β or one of its receptors. In some embodiments, the agent that is an agonist or stimulator of TGF-β and/or its receptor is a small molecule, a protein or peptide, or a nucleic acid.

[0623] In some embodiments, the agent is an antagonist or inhibitor of MCP-1 (CCL2) or a MCP-1 receptor (e.g., MCP-1 receptor CCR2 or CCR4). In some aspects, the agent is an antibody that neutralizes MCP-1 activity, such as an antibody or antigen-binding fragment that binds to MCP-1 or one of its receptors (CCR2 or CCR4). In some embodiments, the MCP-1 antagonist or inhibitor is any described in Gong et al. J Exp Med. 1997 Jul. 7; 186(1): 131-137 or Shahrara et al. J Immunol 2008; 180:3447-3456. In some embodiments, the agent that is an antagonist or inhibitor of MCP-1 and/or its receptor (CCR2 or CCR4) is a small molecule, a protein or peptide, or a nucleic acid.

[0624] In some embodiments, the agent is an antagonist or inhibitor of IFN-γ or an IFN-γ receptor (IFNGR). In some aspects, the agent is an antibody that neutralizes IFN-γ activity, such as an antibody or antigen-binding fragment that binds to IFN-γ or its receptor (IFNGR). In some aspects, the IFN-gamma neutralizing antibody is any described in Dobber et al. Cell Immunol. 1995 Feb;160(2):185-92 or Ozmen et al. J Immunol. 1993 Apr. 1; 150(7):2698-705. In some embodiments, the agent that is an antagonist or inhibitor of IFN-γ/IFNGR is a small molecule, a protein or peptide, or a nucleic acid.

[0625] In some embodiments, the agent is an antagonist or inhibitor of IL-10 or the IL-10 receptor (IL-10R). In some aspects, the agent is an antibody that neutralizes IL-10 activity, such as an antibody or antigen-binding fragment that binds to IL-10 or IL-10R. In some aspects, the IL-10 neutralizing antibody is any described in Dobber et al. Cell Immunol. 1995 February; 160(2):185-92 or Hunter et al. J Immunol. 2005 Jun 1;174(11):7368-75. In some embodiments, the agent that is an antagonist or inhibitor of IL-10/IL-10R is a small molecule, a protein or peptide, or a nucleic acid.

[0626] In some embodiments, the agent is an antagonist or inhibitor of IL-1 or the IL-1 receptor (IL-1R). In some aspects, the agent is an IL-1 receptor antagonist, which is a modified form of IL-1R, such as anakinra (see, e.g., Fleischmann et al., (2006) Annals of the rheumatic diseases. 65(8):1006-12). In some aspects, the agent is an antibody that neutralizes IL-1 activity, such as an antibody or antigen-binding fragment that binds to IL-1 or IL-1R, such as canakinumab (see also EP 2277543). In some embodiments, the agent that is an antagonist or inhibitor of IL-1/IL-1R is a small molecule, a protein or peptide, or a nucleic acid.

[0627] In some embodiments, the agent is an antagonist or inhibitor of a tumor necrosis factor (TNF) or a tumor necrosis factor receptor (TNFR). In some aspects, the agent is an antibody that blocks TNF activity, such as an antibody or antigen-binding fragment that binds to a TNF, such as TNFα, or its receptor (TNFR, e.g., TNFRp55 or TNFRp75). In some aspects, the agent is selected from among infliximab, adalimumab, certolizumab pegol, golimumab and etanercept. In some embodiments, the agent that is an antagonist or inhibitor of TNF/TNFR is a small molecule, a protein or peptide, or a nucleic acid. In some embodiments, the agent is a small molecule that affects TNF, such as lenalidomide (see, e.g., Muller et al. (1999) Bioorganic & Medicinal Chemistry Letters. 9 (11):1625).

[0628] In some embodiments, the agent is an antagonist or inhibitor of signaling through the Janus kinase (JAK) and two Signal Transducer and Activator of Transcription (STAT) signaling cascade. JAK/STAT proteins are common components of cytokine and cytokine receptor signaling. In some embodiments, the agent that is an antagonist or inhibitor of JAK/STAT, such as ruxolitinib (see, e.g., Mesa et al. (2012) Nature Reviews Drug Discovery. 11(2):103-104), tofacitinib (also known as Xeljanz, Jakvinus tasocitinib and CP-690550) , Baricitinib (also known as LY-3009104, INCB-28050), Filgotinib (G-146034, GLPG-0634), Gandotinib (LY-2784544), Lestaurtinib (CEP-701), Momelotinib (GS-0387, CYT-387), Pacritinib (SB1518), and Upadacitinib (ABT-494). In some embodiments, the agent is a small molecule, a protein or peptide, or a nucleic acid.

[0629] In some embodiments, the agent is a kinase inhibitor. In some embodiments, the agent is an inhibitor of Bruton's tyrosine kinase (BTK). In some embodiments, the inhibitor is or comprises ibrutinib or acalabrutinib (see, e.g., Barrett et al., ASH 58^{th} Annual Meeting San Diego, Calif. Dec. 3-6, 2016, Abstract 654; Ruella et al., ASH 58^{th} Annual Meeting San Diego, Calif. Dec. 3-6, 2016, Abstract 2159). In some embodiments, the agent is an inhibitor as described in U.S. Pat. Nos. 7,514,444; 8,008,309; 8,476,284; 8,497,277; 8,697,711; 8,703,780; 8,735,403; 8,754,090; 8,754,091; 8.957,079; 8,999,999; 9,125,889; 9,181,257; or 9,296,753.

[0630] In some embodiments, a device, such as absorbent resin technology with blood or plasma filtration, can be used to reduce cytokine levels. In some embodiments, the device used to reduce cytokine levels is a physical cytokine absorber, such as an extracorporeal cytokine absorber. In some embodiments, a physical cytokine absorber can be used to eliminate cytokines from the bloodstream in an ex vivo, extracorporeal manner. In some embodiments, the agent is a porous polymer. In some embodiments, the agent is CytoSorb (see, e.g., Basu et al. Indian J Crit Care Med. (2014) 18(12): 822-824).

### V. KITS AND ARTICLES OF MUNUFACTURE

[0631] In some embodiments, provided here are kits and/or articles of manufacture that are useful for performing any of the methods provided herein. In particular embodiments, instructions are included for performing the methods with the kits and/or articles of manufacture.

[0632] In certain embodiments, provided herein are kits that are useful for determining, estimating, and/or assess the risk, probability and/or likelihood that a subject will experience a toxicity following administration of a therapy. In some embodiments, provided herein are kits that are useful for detecting a gene signature associated with a risk of toxicity following administration of a therapy. In particular embodiments, the kits are useful for detecting the expression of one or more genes that are associated with a toxicity following administration of a therapy. In certain embodiments, the therapy is a treatment with a therapeutic cell composition. In particular embodiments, the therapeutic cell composition is a cell composition that expresses a recombinant receptor, e.g., a CAR. In some embodiments the toxicity is neurotoxicity. In particular embodiments the toxicity is severe neurotoxicity, e.g., neurotoxicity of grade 4 or 5 and/or of a prolonged grade 3. In certain embodiments, the therapy is for treating a cancer, e.g., acute lymphoblastic leukemia (ALL).

[0633] In some embodiments, the kit includes one or more reagents for measuring, detecting, assessing, and/or quantifying one or more gene products or portions thereof that are associated with a risk of developing a toxicity, e.g., neurotoxicity, to a therapy. In particular embodiments, the gene products are an RNA gene product and/or protein gene products. In some embodiments, the gene products are expressed by any of the genes provided herein, e.g., genes of Section I, such as Section-IB and Section-IE. In particular embodiments, the kit contains a reagent for measuring, detecting, assessing, and/or quantifying one or more gene products that negatively correlate to a risk of developing toxicity. In particular embodiments, the kit contains one or more reagents for measuring, detecting, assessing, and/or quantifying one or more gene products positively that correlate to a risk of developing toxicity. In certain embodiments, the kit contains one or more reagents for detecting one or more gene products expressed and/or encoded by a gene listed in Table 1, Table 2, Table 3, Table E2A, Table E2B, or Table E4 (e.g. a subset of these genes in the relevant Table which as a recited SEQ ID NO, and/or a Uniprot ID). In some embodiments, the gene products are or include one or more gene products expressed and/or encoded by ADGRF1, CA6, CCL17, CCR6, ENAM, GAS6, GBP5, GLI2, IFITM1, IGJ (JCHAIN), MUC4, PON2, PTP4A3, SEMA6A, SLC37A3, SPATS2L, TMEM154, TP53INP1, IL2RA, or WNT9A. In various embodiments, the gene products are or include one or more gene products expressed and/or encoded by CCL17, CA6, JCHAIN, PTP4A3, IFITM1, CRLF2, ENAM, GBP5, ABCA9, SV2C, SLC37A3, IL15, IL2RA, and SEMA6A. In particular embodiments, the gene products are or include one or more gene products expressed and/or encoded by ASAP2, FMNL2, GPR176, MDFI, PCDHGA12, PCDHGA6, PCDHGB5, PCDHGB6, PINLYP, PTCH1, ATP9A, HMX3, DPYSL3, ZNF415, IRX5, TMPRSS15, IL3RA, IGF2BP1, or TTC28. In various embodiments, the gene products are or include one or more gene products expressed and/or encoded by PCDHGA12, PCDHGB6, PCDHGB5, PCDHGA9, PINLYP, ASAP2, TTC28, PTCH1, and FMNL1. In some embodiments, the gene products are or include one or more gene products encoded by CCL17, CCR6, GAS6, GL12, PTP4A3, or IL2RA.

[0634] In certain embodiments, the kit contains one or more reagents for measuring, detecting, assessing, and/or quantifying one or more gene products expressed by one or more genes listed in Table 1 and/or Table E2A and/or one or more genes listed in Table 2 and/or Table E2B (e.g. a subset of these genes in the relevant Table which as a recited SEQ ID NO, and/or a Uniprot ID). In some embodiments, the kit contains one or more reagents for measuring, detecting, assessing, and/or quantifying one or more gene products from one or more of ABCA9, ADAMTSL4, ADGRA2, ADGRF1, AKS, APOL1, ARHGAP27, ARID3B, CA6, CABP7, CCDC152, CCL17, CCR1, CCR6, CEP85L, CISH, CR2, CRLF2, ENAM, ENPP2, EPHA4, FTH1P11, FTH1P2, FTH1P8, GADD45A, GAS6, GBP3, GBP5, GBP6, GIMAP1-GIMAPS, GLI2, GPA33, GPRIN3, HSPA1A, IFITM1, IFITM3, IL15, IL2RA, JCHAIN, KIAA1257, LA16c-390H2.4, LAMB1, LDB3, LINC00623, LST1, LTB, LY6E, MAS1, MUC4, NLRC3, PLXNA4, PON2, PTGES3P1, PTP4A3, RNU1-1, RP11-345J4.6, RP11-421N8.1, RP11-51J9.5, RP11-51O6.1, RP11-552F3.9, RP11-686D22.9, RP11-723D22.3, RP11-723O4.6, RP13-512J5.1, RP4-620F22.2, RP5-940J5.9, RP6-109B7.5, RPL21P75, RYR2, SAMD9L, SEMA6A, SLC37A3, SNRPEP4, SOCS1, SPATS2L, SPON1, SV2C, TMEM154, TP53ITP1, TNF, TRIM47, UST, WNT9A, ENG, SELE, ICAM3, or IL6R, and/or one or more of ASAP2, ATP8B1, ATP9A, CCNA1, CDHR3, CECR2, CELF4, DLX1, DPYSL3, EHD4, FMNL2, GGA2, GPR176, HHIPL1, HOXA7, HMX3, IGF2BP1, IL3RA, IRX3, IRX5, KCNIP1, KIAA1644, LINC00092, LINC01483, MDFI, MIB1, MMP14, NOM1, OTOA, PCDHGA12, PCDHGA4, PCDHGA6, PCDHGB1, PCDHGB5, PCDHGB6, PINLYP, PPM1E, PRKD1, PROKR2, PRSS12, PRTG, PTCH1, RFX8, RP11-146B14.1, RP11-3P17.5, RP11-41O4.1, RP11-713N11.4, RP4-568B10.1, SERF1A, SEZ6L, SMURF1, TBC1D30, TCF12, TCP11, TM9SF3, TMPRSS15, TMSB15A, TNKS1BP1, TREM2, TTC28, PCDHGA9, FMNL1, or ZNF415.

[0635] In certain embodiments, the kit contains one or more reagents for measuring, detecting, assessing, and/or quantifying one or more gene products expressed by one or more of ADGRF1, CA6, CCL17, CCR6, ENAM, GAS6, GBP5, GLI2, IFITM1, IGJ (JCHAIN), MUC4, PON2, PTP4A3, SEMA6A, SLC37A3, SPATS2L, TMEM154, TP53INP1, IL2RA, and WNT9A and/or one or more of ASAP2, FMNL2, GPR176, MDFI, PCDHGA12, PCDHGA6, PCDHGB5, PCDHGB6, PINLYP, PTCH1, ATP9A, HMX3, DPYSL3, ZNF415, IRX5, TMPRSS15, IL3RA, IGF2BP1, or TTC28.

[0636] In certain embodiments, the kit contains one or more reagents for measuring, detecting, assessing, and/or quantifying one or more gene products expressed by one or more of IGJ (JCHAIN), MUC4, CA6, WNT9A, ADGRF1 and CCL17 and/or one or more of PINLYP, ASAP2, FMNL2, PTCH1, TTC28, PCDHGA6, PCDHGB6 and PCDHGA12. In particular embodiments, the kit contains one or more reagents for measuring, detecting, assessing, and/or quantifying one or more gene products expressed by one or more of IGJ (JCHAIN), MUC4, CA6, WNT9A, ADGRF1 and CCL17 and/or one or more of PINLYP and PCDHGA12.

[0637] In some embodiments, the kit includes and/or contains one, at least two, at least three, at least four, at least five, at least six, at least seven, at least eight, at least nine, at least ten, at least eleven, at least twelve, at least thirteen, at least fourteen, at least fifteen, at least sixteen, at least seventeen, at least eighteen, at least twenty, at least twenty-one, at least twenty-two, at least twenty-three, at least twenty-four, at least twenty-five, at least twenty-six, at least twenty-seven, at least twenty-eight, at least twenty-nine, at least thirty, at least thirty-five, at least forty, at least fifty, at least sixty, at least seventy, at least eighty, at least ninety, or at least one hundred reagents for measuring, detecting, assessing, and/or quantifying one or more gene products. In some embodiments, reagents for measuring, detecting, assessing, and/or quantifying one or more gene products may include, but are not limited to, oligonucleotides, polynucleotides, polypeptides, antibodies or an antigen binding fragments thereof, and/or small molecules that are capable of recognizing, binding, or otherwise indicating the presence of the gene product, or portion thereof, in a sample. In certain embodiments, the reagent has an attached, e.g., covalently attached detectable label, e.g., a fluorescent label.

[0638] In some embodiments, the kit also contains one or more reagents for assessing, measuring, detecting, and/or quantifying a parameter of the therapeutic cell composition. In certain embodiments, the kit contains a reagent that is useful for stimulating a receptor, such as a recombinant receptor or a CAR, that are expressed by at least some of the cells in the therapeutic cell composition. In particular embodiments, kit contains one or more reagents for measuring, detecting, assessing, and/or quantifying proinflammatory cytokines. In some embodiments, the kit contains one or more reagents for measuring, detecting, assessing, and/or quantifying one or more of IL-2, IL-13, IFN-gamma, or TNF-alpha.

[0639] In some embodiments, provided herein is a kit for administering a therapeutic T cell composition to a subject. In certain embodiments, the kit contains the therapeutic T cell composition and instructions for administering the therapeutic T cell composition to a subject. In certain embodiments, the instructions are for administering the therapeutic T cell composition to a subject by any method provided herein. In certain embodiments, the instructions for use indicate that if the expression of one or more gene products or portions thereof in a sample from the subject, in relation to a gene reference value, indicates that the subject is not likely to develop toxicity, e.g., severe neurotoxicity, associated with the therapeutic T cell composition, then the therapeutic T cell composition is administered to the subject. In particular embodiments, the instructions for use indicate that if the expression of one or more gene products or portions thereof in a sample from the subject indicates that the subject is likely to develop toxicity, e.g., severe neurotoxicity, then an alternative therapeutic treatment is administered to the subject. In some embodiments, an alternative therapeutic treatment is a therapeutic treatment other than the therapeutic T cell composition, a low dosage amount of the therapeutic T cell composition and/or a combination of the therapeutic T cell composition and one or more interventions for ameliorating the risk of developing neurotoxicity.

[0640] Also provided herein are articles of manufacture, wherein the articles of manufacture includes a kit provided herein and instructions for use. In some embodiments, the instructions described any of the methods provided herein.

[0641] In some embodiments, the articles of manufacture contain an immunotherapy and instructions for administering the immunotherapy. In some embodiments, the immunotherapy is an immunotherapy described in Section II, e.g., an immune cell activator described in Section II-A or a cell therapy described in Section in Section II-B. In some embodiments, the immunotherapy is a cell therapy, such as a CAR-T cell therapy. In particular embodiments, the instructions specify that the immunotherapy is administered to a subject that has been selected or identified as having a PH+ and/or Ph-like molecular subtype of ALL. In some embodiments, the instructions specify that the immunotherapy is not administered to a subject that has been selected or identified to have a molecular subtype of ALL that is not PH+ or Ph-like. In some embodiments, the instructions specify that the immunotherapy is administered to a subject that is selected or identified as having a PH+ or Ph-like molecular phenotype of ALL by a method as described in Section I-D.

[0642] In some embodiments, the articles of manufacture contain an immunotherapy and instructions for administering the immunotherapy to a subject. In some embodiments, the instructions specify having a positive, increased, and/or elevated expression of a gene listed in in Table 1 and/or Table E2A (e.g. a subset of these genes in the relevant Table which as a recited SEQ ID NO, and/or a Uniprot ID). In particular embodiments, the instructions specify that the immunotherapy is administered to a subject having reduced, decreased, and/or negative expression of one or more genes listed in Table 2 and/or Table E2B (e.g. a subset of these genes in the relevant Table which as a recited SEQ ID NO, and/or a Uniprot ID). In some embodiments, the instructions specify that the immunotherapy is not administered to a subject having reduced, decreased, and/or negative expression of one or more genes listed in Table 1 and/or Table E2A (e.g. a subset of these genes in the relevant Table which as a recited SEQ ID NO, and/or a Uniprot ID). In some embodiments, the instructions specify that the immunotherapy is not administered to a subject having increased, elevated, and/or positive expression of one or more genes listed in Table 2 and/or Table E2B (e.g. a subset of these genes in the relevant Table which as a recited SEQ ID NO, and/or a Uniprot ID).

### VI. DEFINITIONS

[0643] Unless defined otherwise, all terms of art, notations and other technical and scientific terms or terminology used herein are intended to have the same meaning as is commonly understood by one of ordinary skill in the art to which the claimed subject matter pertains. In some cases, terms with commonly understood meanings are defined herein for clarity and/or for ready reference, and the inclusion of such definitions herein should not necessarily be construed to represent a substantial difference over what is generally understood in the art.

[0644] As used herein, recitation that nucleotides or amino acid positions “correspond to” nucleotides or amino acid positions in a disclosed sequence, such as set forth in the Sequence listing, refers to nucleotides or amino acid positions identified upon alignment with the disclosed sequence to maximize identity using a standard alignment algorithm, such as the GAP algorithm. By aligning the sequences, one skilled in the art can identify corresponding residues, for example, using conserved and identical amino acid residues as guides. In general, to identify corresponding positions, the sequences of amino acids are aligned so that the highest order match is obtained (see, e.g.: Computational Molecular Biology, Lesk, A. M., ed., Oxford University Press, New York, 1988; Biocomputing: Informatics and Genome Projects, Smith, D. W., ed., Academic Press, New York, 1993; Computer Analysis of Sequence Data, Part I, Griffin, A. M., and Griffin, H. G., eds., Humana Press, New Jersey, 1994; Sequence Analysis in Molecular Biology, von Heinje, G., Academic Press, 1987; and Sequence Analysis Primer, Gribskov, M. and Devereux, J., eds., M Stockton Press, New York, 1991; Carrillo et al. (1988) SIAM J Applied Math 48: 1073).

[0645] As used herein, “percent (%) sequence identity” and “percent identity” when used with respect to a nucleotide sequence (reference nucleotide sequence) or amino acid sequence (reference amino acid sequence) is defined as the percentage of nucleotide residues or amino acid residues, respectively, in a candidate sequence that are identical with the residues in the reference sequence, after aligning the sequences and introducing gaps, if necessary, to achieve the maximum percent sequence identity. Alignment for purposes of determining percent sequence identity can be achieved in various ways that are within the skill in the art, for instance, using publicly available computer software such as BLAST, BLAST-2, ALIGN or Megalign (DNASTAR) software. Those skilled in the art can determine appropriate parameters for aligning sequences, including any algorithms needed to achieve maximal alignment over the full length of the sequences being compared.

[0646] As used herein, “percent (%) amino acid sequence identity” and “percent identity” when used with respect to an amino acid sequence (reference polypeptide sequence) is defined as the percentage of amino acid residues in a candidate sequence (e.g., the subject antibody or fragment) that are identical with the amino acid residues in the reference polypeptide sequence, after aligning the sequences and introducing gaps, if necessary, to achieve the maximum percent sequence identity, and not considering any conservative substitutions as part of the sequence identity. Alignment for purposes of determining percent amino acid sequence identity can be achieved in various ways that are within the skill in the art, for instance, using publicly available computer software such as BLAST, BLAST-2, ALIGN or Megalign (DNASTAR) software. Those skilled in the art can determine appropriate parameters for aligning sequences, including any algorithms needed to achieve maximal alignment over the full length of the sequences being compared.

[0647] An amino acid substitution may include replacement of one amino acid in a polypeptide with another amino acid. Amino acid substitutions may be introduced into a binding molecule, e.g., antibody, of interest and the products screened for a desired activity, e.g., retained/improved antigen binding, decreased immunogenicity, or improved ADCC or CDC.

[0648] Amino acids generally can be grouped according to the following common side-chain properties:
[0649] (1) hydrophobic: Norleucine, Met, Ala, Val, Leu, Ile;
[0650] (2) neutral hydrophilic: Cys, Ser, Thr, Asn, Gln;
[0651] (3) acidic: Asp, Glu;
[0652] (4) basic: His, Lys, Arg;
[0653] (5) residues that influence chain orientation: Gly, Pro;
[0654] (6) aromatic: Trp, Tyr, Phe

[0655] Non-conservative amino acid substitutions will involve exchanging a member of one of these classes for another class.

[0656] As used herein, the singular forms “a,” “an,” and “the” include plural referents unless the context clearly dictates otherwise. For example, “a” or “an” means “at least one” or “one or more.” It is understood that aspects and variations described herein include “consisting” and/or “consisting essentially of” aspects and variations.

[0657] Throughout this disclosure, various aspects of the claimed subject matter are presented in a range format. It should be understood that the description in range format is merely for convenience and brevity and should not be construed as an inflexible limitation on the scope of the claimed subject matter. Accordingly, the description of a range should be considered to have specifically disclosed all the possible sub-ranges as well as individual numerical values within that range. For example, where a range of values is provided, it is understood that each intervening value, between the upper and lower limit of that range and any other stated or intervening value in that stated range is encompassed within the claimed subject matter. The upper and lower limits of these smaller ranges may independently be included in the smaller ranges, and are also encompassed within the claimed subject matter, subject to any specifically excluded limit in the stated range. Where the stated range includes one or both of the limits, ranges excluding either or both of those included limits are also included in the claimed subject matter. This applies regardless of the breadth of the range.

[0658] The term “about” as used herein refers to the usual error range for the respective value readily known to the skilled person in this technical field. Reference to “about” a value or parameter herein includes (and describes) embodiments that are directed to that value or parameter per se. For example, description referring to “about X” includes description of “X”. In some embodiments, “about” refers to within ±25%, ±20%, ±15%, ±10%, ±5%, or ±1% of the value or parameter.

[0659] The terms “polypeptide” and “protein” are used interchangeably to refer to a polymer of amino acid residues, and are not limited to a minimum length. Polypeptides, including the provided antibodies and antibody chains and other peptides, e.g., linkers, may include amino acid residues including natural and/or non-natural amino acid residues. The terms also include post-expression modifications of the polypeptide, for example, glycosylation, sialylation, acetylation, phosphorylation, and the like. In some aspects, the polypeptides may contain modifications with respect to a native or natural sequence, as long as the protein maintains the desired activity. These modifications may be deliberate, as through site-directed mutagenesis, or may be accidental, such as through mutations of hosts which produce the proteins or errors due to PCR amplification.

[0660] As used herein, a composition refers to any mixture of two or more products, substances, or compounds, including cells. It may be a solution, a suspension, liquid, powder, a paste, aqueous, non-aqueous or any combination thereof.

[0661] As used herein, a statement that a cell or population of cells is “positive” for a particular marker refers to the detectable presence on or in the cell of a particular marker, typically a surface marker. When referring to a surface marker, the term refers to the presence of surface expression as detected by flow cytometry, for example, by staining with an antibody that specifically binds to the marker and detecting said antibody, wherein the staining is detectable by flow cytometry at a level substantially above the staining detected carrying out the same procedure with an isotype-matched control under otherwise identical conditions and/or at a level substantially similar to that for cell known to be positive for the marker, and/or at a level substantially higher than that for a cell known to be negative for the marker.

[0662] As used herein, a statement that a cell or population of cells is “negative” for a particular marker refers to the absence of substantial detectable presence on or in the cell of a particular marker, typically a surface marker. When referring to a surface marker, the term refers to the absence of surface expression as detected by flow cytometry, for example, by staining with an antibody that specifically binds to the marker and detecting said antibody, wherein the staining is not detected by flow cytometry at a level substantially above the staining detected carrying out the same procedure with an isotype-matched control under otherwise identical conditions, and/or at a level substantially lower than that for cell known to be positive for the marker, and/or at a level substantially similar as compared to that for a cell known to be negative for the marker.

### VII. EXEMPLARY EMBODIMENTS

[0663] Among the provided embodiments are:

[0664] 1. A method of assessing a risk of a toxicity or a toxicity-related outcome, following administration of an immunotherapy, the method comprising:

[0665] (1) assessing the presence, absence or level of expression of one or more gene products or portions thereof in a sample from a subject that is a candidate for receiving a immunotherapy for treatment of a disease or condition, wherein:
[0666] the one or more gene products is associated with a risk of developing neurotoxicity following administration of the immunotherapy; and
[0667] the sample does not comprise the immunotherapy and/or is obtained from the subject prior to receiving the immunotherapy; and

[0668] (2) comparing the presence, absence or level of expression of the one or more gene products or portions thereof to a gene reference value, wherein the comparison indicates the risk or likely risk of the subject developing a neurotoxicity, optionally a specified grade or severity of neurotoxicity, following administration of the therapy to the subject.

[0669] 2. The method of embodiment 1, wherein each of the one or more gene products is individually compared to a gene reference value for the respective gene product.

[0670] 3. The method of embodiment 1 or embodiment 2, wherein:

[0671] (a) at least one of the one or more gene products is from a first group of gene products that negatively correlate to a risk of developing neurotoxicity; and/or

[0672] (b) at least one of the one or more gene products is from a second group of gene products that positively correlates to a risk of developing neurotoxicity.

[0673] 4. The method of embodiment 3, wherein the at least one gene product is from (a) and is selected from ABCA9, ADAMTSL4, ADGRA2, ADGRF1, AK5, APOL1, ARHGAP27, ARID3B, CA6, CABP7, CCDC152, CCL17, CCR1, CCR6, CEP85L, CISH, CR2, CRLF2, ENAM, ENPP2, EPHA4, FTH1P11, FTH1P2, FTH1P8, GADD45A, GAS6, GBP3, GBP5, GBP6, GIMAP1-GIMAP5, GLI2, GPA33, GPRIN3, HSPA1A, IFITM1, IFITM3, IL15, IL2RA, JCHAIN, KIAA1257, LA16c-390H2.4, LAMB1, LDB3, LINC00623, LST1, LTB, LY6E, MAS1, MUC4, NLRC3, PLXNA4, PON2, PTGES3P1, PTP4A3, RNU1-1, RP11-345J4.6, RP11-421N8.1, RP11-51J9.5, RP11-51O6.1, RP11-552F3.9, RP11-686D22.9, RP11-723D22.3, RP11-723O4.6, RP13-512J5.1, RP4-620F22.2, RP5-940J5.9, RP6-109B7.5, RPL21P75, RYR2, SAMD9L, SEMA6A, SLC37A3, SNRPEP4, SOCS1, SPATS2L, SPON1, SV2C, TMEM154, TP53INP1, TNF, TRIM47, UST, WNT9A, ENG, SELE, ICAM3, or IL6R, or is a portion or fragment thereof.

[0674] 5. The method of embodiment 3 or embodiment 4, wherein the at least one gene product is from (b) and is selected from ASAP2, ATP8B1, ATP9A, CCNA1, CDHR3, CECR2, CELF4, DLX1, DPYSL3, EHD4, FMNL2, GGA2, GPR176, HHIPL1, HOXA7, HMX3, IGF2BP1, IL3RA, IRX3, IRX5, KCNIP1, KIAA1644, LINC00092, LINC01483, MDFI, MIB1, MMP14, NOM1, OTOA, PCDHGA12, PCDHGA4, PCDHGA6, PCDHGB1, PCDHGB5, PCDHGB6, PINLYP, PPM1E, PRKD1, PROKR2, PRSS12, PRTG, PTCH1, RFX8, RP11-146B14.1, RP11-3P17.5, RP11-41O4.1, RP11-713N11.4, RP4-568B10.1, SERF1A, SEZ6L, SMURF1, TBC1D30, TCF12, TCP11, TM9SF3, TMPRSS15, TMSB15A, TNKS1BP1, TREM2, TTC28, PCDHGA9, FMNL1, or ZNF415 or is a portion or fragment thereof.

[0675] 6. A method of assessing a risk of toxicity following administration of a immunotherapy, the method comprising:

[0676] (1) assessing the presence, absence or level of expression of one or more gene products or a portion thereof in a sample from a subject that is a candidate for receiving a immunotherapy for treating a disease or condition, wherein (a) at least one of the one or more gene products is selected from ABCA9, ADAMTSL4, ADGRA2, ADGRF1, AK5, APOL1, ARHGAP27, ARID3B, CA6, CABP7, CCDC152, CCL17, CCR1, CCR6, CEP85L, CISH, CR2, CRLF2, ENAM, ENPP2, EPHA4, FTH1P11, FTH1P2, FTH1P8, GADD45A, GAS6, GBP3, GBP5, GBP6, GIMAP1-GIMAP5, GLI2, GPA33, GPRIN3, HSPA1A, IFITM1, IFITM3, IL15, IL2RA, JCHAIN, KIAA1257, LA16c-390H2.4, LAMB1, LDB3, LINC00623, LST1, LTB, LY6E, MAS1, MUC4, NLRC3, PLXNA4, PON2, PTGES3P1, PTP4A3, RNU1-1, RP11-345J4.6, RP11-421N8.1, RP11-51J9.5, RP11-51O6.1, RP11-552F3.9, RP11-686D22.9, RP11-723D22.3, RP11-723O4.6, RP13-512J5.1, RP4-620F22.2, RP5-940J5.9, RP6-109B7.5, RPL21P75, RYR2, SAMD9L, SEMA6A, SLC37A3, SNRPEP4, SOCS1, SPATS2L, SPON1, SV2C, TMEM154, TP53INP1, TNF, TRIM47, UST, WNT9A, ENG, SELE, ICAM3, or IL6R, or is a portion or fragment thereof; and/or (b) at least one of the one or more gene products is selected from ASAP2, ATP8B1, ATP9A, CCNA1, CDHR3, CECR2, CELF4, DLX1, DPYSL3, EHD4, FMNL2, GGA2, GPR176, HHIPL1, HOXA7, HMX3, IGF2BP1, IL3RA, IRX3, IRX5, KCNIP1, KIAA1644, LINC00092, LINC01483, MDFI, MIB1, MMP14, NOM1, OTOA, PCDHGA12, PCDHGA4, PCDHGA6, PCDHGB1, PCDHGB5, PCDHGB6, PINLYP, PPM1E, PRKD1, PROKR2, PRSS12, PRTG, PTCH1, RFX8, RP11-146B14.1, RP11-3P17.5, RP11-41O4.1, RP11-713N11.4, RP4-568B10.1, SERF1A, SEZ6L, SMURF1, TBC1D30, TCF12, TCP11, TM9SF3, TMPRSS15, TMSB15A, TNKS1BP1, TREM2, TTC28, PCDHGA9, FMNL1, or ZNF415 or is a portion or fragment thereof; and

[0677] (2) comparing the presence, absence or level of expression of the one or more gene product to a gene reference value, wherein the comparison indicates whether the subject is or is likely at risk of developing a neurotoxicity or grade or severity thereof following administration of the immunotherapy when administered to the subject.

[0678] 7. The method of embodiment 6, wherein each of the one or more gene products is individually compared to a gene reference value for the respective gene product.

[0679] 8. The method of any of embodiments 1-7, wherein the immunotherapy is a cell therapy or is a T cell-engaging therapy, optionally wherein the cell therapy comprises cells engineered to express a recombinant receptor.

[0680] 9. The method of embodiment 6, 7 or 8, wherein the sample does not comprise the immunotherapy, and/or is obtained from the subject prior to receiving the cell therapy.

[0681] 10. The method of any of embodiments 1-9, wherein the sample does not contain cells genetically engineered with the recombinant receptor.

[0682] 11. The method of any of embodiments 3-10, wherein the presence, absence or level of the one or more gene products is associated with a risk of developing neurotoxicity following administration of the immunotherapy, optionally a cell therapy.

[0683] 12. The method of embodiment 11, wherein: expression of the at least one or more gene products from (a) negatively correlate to a risk of developing neurotoxicity; and/or expression of the at least one or more gene products from (b) positively correlates to a risk of developing neurotoxicity.

[0684] 13. The method of any of embodiments 3-12, wherein: the comparison indicates the subject is or is likely at risk of developing neurotoxicity if the at least one gene product of (a) is at or below a gene reference value and/or the at least one gene product of (b) is at or above a gene reference value; or

[0685] the comparison indicates the subject is not or is likely not at risk of developing neurotoxicity if the at least one gene product of (a) is above a gene reference value and/or the at least one gene product of (b) is below a gene reference value.

[0686] 14. The method of any of embodiment 3-13, wherein if the comparison indicates the subject is or is likely to develop neurotoxicity, selecting the subject for administration of a therapeutic regimen, the therapeutic regimen comprising administering to the subject:

[0687] i. an agent or other treatment capable of treating, preventing, delaying, reducing or attenuating the development or risk of development of a toxicity and the immunotherapy, wherein administration of the agent is to be administered (i) prior to, (ii) within one, two, or three days of, (iii) concurrently with and/or (iv) at first fever following, the initiation of administration of the immunotherapy to the subject;

[0688] ii. the immunotherapy at a reduced dose or at a dose that is not associated with risk of developing toxicity or severe toxicity, or is not associated with a risk of developing a toxicity or severe toxicity in a majority of subjects, and/or a majority of subjects having a disease or condition that the subject has or is suspected of having, following administration of the immunotherapy; and/or

[0689] iii. the immunotherapy in an in-patient setting and/or with admission to the hospital for one or more days, optionally wherein the immunotherapy is otherwise to be administered to subjects on an outpatient basis or without admission to the hospital for one or more days; or
[0690] iv. an alternative therapeutic treatment other than the immunotherapy.

[0691] 15. The method of any of embodiments 1-13, wherein if the comparison indicates the subject is not or is likely not at risk of developing neurotoxicity, selecting the subject for administration of a therapeutic regimen, the therapeutic regimen comprising administering to the subject:

[0692] i. the immunotherapy, optionally at a non-reduced dose, optionally on an outpatient basis or without admission to the hospital for one or more days;

[0693] ii. the immunotherapy, wherein administration of the immunotherapy does not comprise administering, prior to or concurrently with administering the immunotherapy and/or prior to the development of a sign or symptom of toxicity other than fever, an agent or treatment capable of treating, preventing, delaying, or attenuating the development of the toxicity; or

[0694] iii. the immunotherapy in an outpatient setting and/or without admission of the subject to the hospital overnight or for one or more consecutive days and/or is without admission of the subject to the hospital for one or more days.

[0695] 16. The method of embodiment 14 or embodiment 15, further comprising administering the therapeutic regimen to the selected subject.

[0696] 17. A method of treatment, the method comprising administering a therapeutic regimen to a subject that is a candidate for receiving an immunotherapy for treatment of a disease or condition, wherein the administration is carried out following or based on the results of assessing the presence, absence or level of expression, from a sample from the subject, of one or more gene products or portion thereof, wherein:

[0697] (a) at least one of the one or more gene products is selected from ABCA9, ADAMTSL4, ADGRA2, ADGRF1, AKS, APOL1, ARHGAP27, ARID3B, CA6, CABP7, CCDC152, CCL17, CCR1, CCR6, CEP85L, CISH, CR2, CRLF2, ENAM, ENPP2, EPHA4, FTH1P11, FTH1P2, FTH1P8, GADD45A, GAS6, GBP3, GBP5, GBP6, GIMAP1-GIMAPS, GLI2, GPA33, GPRIN3, HSPA1A, IFITM1, IFITM3, IL15, IL2RA, JCHAIN, KIAA1257, LA16c-390H2.4, LAMB1, LDB3, LINC00623, LST1, LTB, LY6E, MAS 1, MUC4, NLRC3, PLXNA4, PON2, PTGES3P1, PTP4A3, RNU1-1, RP11-345J4.6, RP11-421N8.1, RP11-51J9.5, RP11-51O6.1, RP11-552F3.9, RP11-686D22.9, RP11-723D22.3, RP11-723O4.6, RP13-512J5.1, RP4-620F22.2, RP5-940J5.9, RP6-109B7.5, RPL21P75, RYR2, SAMD9L, SEMA6A, SLC37A3, SNRPEP4, SOCS1, SPATS2L, SPON1, SV2C, TMEM154, TP53INP1, TNF, TRIM47, UST, WNT9A, ENG, SELE, ICAM3, or IL6R, or is a portion or fragment thereof; and/or

[0698] (b) at least one of the one or more gene products is selected from ASAP2, ATP9A, CCNA1, CDHR3, CECR2, DLX1, DPYSL3, EHD4, FMNL2, GGA2, HHIPL1, HMX3, IGF2BP1, IL3RA, IRX5, KCNIP1, KIAA1644, LINC00092, LINC01483, MIB1, MMP14, NOM1, OTOA, PCDHGA12, PCDHGA4, PCDHGA6, PCDHGBS, PCDHGB6, PINLYP, PPM1E, PRKD1, PROKR2, PRTG, PTCH1, RFX8, RP11-146B14.1, RP11-3P17.5, RP11-41O4.1, RP11-713N11.4, RP4-568B10.1, SERF1A, SEZ6L, SMURF1, TBC1D30, TCF12, TCP11, TM9SF3, TMPRSS15, TNKS1BP1, TTC28, PCDHGA9, FMNL1, or ZNF415 or is a portion or fragment thereof.

[0699] 18. The method of embodiment 17, wherein the immunotherapy is a cell therapy or is a T cell-engaging therapy, optionally wherein the cell therapy comprises cells engineered to express a recombinant receptor.

[0700] 19. The method of embodiment 17 or 18, wherein the sample is obtained from the subject prior to receiving the immunotherapy and/or the sample does not comprise the immunotherapy.

[0701] 20. The method of any of embodiments 17-19, wherein the presence, absence or level of the one or more gene products is associated with a risk of developing neurotoxicity following administration of the immunotherapy.

[0702] 21. The method of any of embodiments 17-20, wherein the results of assessing the presence, absence or level of expression of the one or more gene products or portions thereof comprises a comparison to a gene reference value, wherein the comparison indicates the risk or likely risk of the subject developing neurotoxicity following administration of the immunotherapy when administered to the subject.

[0703] 22. The method of embodiment 21, wherein each of the one or more gene products is individually compared to a gene reference value for the respective gene product.

[0704] 23. The method of any of embodiments 20-22, wherein:

[0705] expression of the at least one or more gene products from (a) negatively correlate to a risk that the subject is or is likely to develop neurotoxicity following administration of the immunotherapy when it is administered; and/or

[0706] expression of the at least one or more gene products from (b) positively correlates to a risk that the subject is or is likely to develop neurotoxicity following administration of the immunotherapy when it is administered.

[0707] 24. The method of any of embodiments 17-23, wherein if the assessing indicates the subject is or is likely to develop neurotoxicity following administration of the immunotherapy, the therapeutic regimen comprises administering to the subject:

[0708] i. an agent or other treatment capable of treating, preventing, delaying, reducing or attenuating the development or risk of development of a toxicity and (2) the immunotherapy, wherein administration of the agent is to be administered (i) prior to, (ii) within one, two, or three days of, (iii) concurrently with and/or (iv) at first fever following, the initiation of administration of the immunotherapy to the subject;

[0709] ii. the immunotherapy at a reduced dose or at a dose that is not associated with risk of developing toxicity or severe toxicity, or is not associated with a risk of developing a toxicity or severe toxicity in a majority of subjects, and/or a majority of subjects having a disease or condition that the subject has or is suspected of having, following administration of the immunotherapy; and/or

[0710] iii. the immunotherapy in an in-patient setting and/or with admission to the hospital for one or more days, optionally wherein the immunotherapy is otherwise to be administered to subjects on an outpatient basis or without admission to the hospital for one or more days; or

[0711] iv. an alternative therapeutic treatment other than the immunotherapy.

[0712] 25. The method of any of embodiments 17-24, wherein if the assessing indicates the subject is not or is likely not to develop neurotoxicity following administration of the immunotherapy, the therapeutic regimen comprises administering to the subject:

[0713] i. the immunotherapy, optionally at a non-reduced dose, optionally on an outpatient basis or without admission to the hospital for one or more days;

[0714] ii. the immunotherapy, wherein administration of the immunotherapy does not comprise administering, prior to or concurrently with administering the immunotherapy and/or prior to the development of a sign or symptom of toxicity other than fever, an agent or treatment capable of treating, preventing, delaying, or attenuating the development of the toxicity; or

[0715] iii. the immunotherapy in an outpatient setting and/or without admission of the subject to the hospital overnight or for one or more consecutive days and/or is without admission of the subject to the hospital for one or more days.

[0716] 26. The method of any of embodiments 1-25, wherein the disease or condition is a cancer, optionally a myeloma, lymphoma or leukemia.

[0717] 27. The method of any of embodiments 1-26, wherein the disease or condition is a B cell malignancy.

[0718] 28. The method of embodiment 27, wherein the B cell malignancy is selected from acute lymphoblastic leukemia (ALL), chronic lymphoblastic leukemia (CLL), acute myelogenous leukemia (AML), chronic myelogenous leukemia (CML), non-Hodgkin lymphoma (NHL), or Diffuse Large B-Cell Lymphoma (DLBCL), or a subtype of any of the foregoing.

[0719] 29. The method of any of embodiments 1-28, wherein the disease or condition is acute lymphoblastic leukemia (ALL) or a subtype thereof.

[0720] 30. The method of any of embodiments 1-29, wherein the at least one gene product is from (a) and is a gene product associated with a PH+ or Ph-like molecular subtype of ALL.

[0721] 31. The method of embodiment 30, wherein the at least one gene product is selected from ADGRF1, BMPR1B, CA6, CCL17, CCR6, CD99, CHN2, CRLF2, DENND3, ENAM, GAS6, GBP5, GLI2, IFITM1, IGJ (JCHAIN), LDB3, L0645744, MDF1C, MUC4, NRXN3, PON2, PTP4A3, S100Z, SEMA6A, SLC37A3, SLC2A5, SPATS2L, TMEM154, TP53INP1, TTYH2, IL2RA, or WNT9A, or is a portion or fragment of any of the foregoing.

[0722] 32. A method of treatment, the method comprising:

[0723] selecting a subject that exhibits a Philadelphia chromosome (Ph+) and/or Ph chromosome-like (Ph-like) molecular subtype of acute lymphoblastic leukemia (ALL); and administering to the subject a immunotherapy that binds to an antigen associated with the ALL.

[0724] 33. The method of embodiment 32, wherein the immunotherapy is a cell therapy or is a T cell-engaging therapy, optionally wherein the cell therapy comprises cells engineered to express a recombinant receptor.

[0725] 34. The method of embodiment 32 or 33, wherein the subject is selected based on results of cytogenetic or molecular genetic analysis.

[0726] 35. The method of embodiment 32 or 33, wherein the analysis comprises karyotype analysis, fluorescence in situ hybridization (FISH), multicolor FISH, polymerase chain reaction (PCR), a tyrosine kinase inhibitor assay, gene expression profiling or microarray or an immunoassay, optionally an ELISA.

[0727] 36. The method of any of embodiments 32-35, wherein:

[0728] the selected subject exhibits one or more of the (9;22)(q34;q11) chromosomal abnormality; deletion or mutation of IKZF1 transcription factor; a kinase-activating alteration, optionally a rearrangement involving ABL1, ABL2, CRLF2, CSF1R, EPOR, JAK2, NTRK3, PDGFRB, PTK2B, TSLP, or TYK2; a sequence mutation involving FLT3, IL7R, SH2B3, TYK2, IL2RB, NTRK3, DGKH, KRAS, NRAS, PTPN11, NF1; and/or comprises a Ph-like gene expression signature;

[0729] the subject is selected based on one or more of the presence of the (9;22)(q34;q11) chromosomal abnormality, deletion or mutation of IKZF1 transcription factor; a kinase-activating alteration, optionally a rearrangement involving ABL1, ABL2, CRLF2, CSF1R, EPOR, JAK2, NTRK3, PDGFRB, PTK2B, TSLP, or TYK2; a sequence mutation involving FLT3, IL7R, SH2B3, TYK2, IL2RB, NTRK3, DGKH, KRAS, NRAS, PTPN11, NF1; and/or the presence of a Ph-like gene expression signature.

[0730] 37. The method of any of embodiments 33-36, wherein the presence of the Ph-like gene signature is based on comparison of the presence, absence or level of expression, in a sample from the subject, of at least one gene product to a reference gene value, said at least one gene product is selected from (a) ADGRF1, BMPR1B, CA6, CCL17, CCR6, CD99, CHN2, CRLF2, DENND3, ENAM, GAS6, GBP5, GLI2, IFITM1, IGJ (JCHAIN), LDB3, LO645744, MDF1C, MUC4, NRXN3, PON2, PTP4A3, S100Z, SEMA6A, SLC37A3, SLC2A5, SPATS2L, TMEM154, TP53INP1, TTYH2, IL2RA, or WNT9A or a portion or fragment of any of the foregoing and/or said at least one gene product is selected from (b) ASAP2, FMNL2, GPR176, MDFI, PCDHGA12, PCDHGA6, PCDHGBS, PCDHGB6, PINLYP, PTCH1, ATP9A, HMX3, DPYSL3, ZNF415, IRX5, TMPRSS15, IL3RA, IGF2BP1, or TTC28 or is a portion or fragment of any of the foregoing, whereby the comparison indicates whether the subject exhibits a Ph-like molecular subtype of ALL.

[0731] 38. The method of embodiment 37, wherein each of the one or more gene products is individually compared to a gene reference value for the respective gene product.

[0732] 39. The method of any of embodiment 37 or embodiment 38, wherein the subject exhibits a Ph-like molecular subtype of ALL if the comparison indicates the at least one gene product of (a) is above a gene reference value and/or the at least one gene product of (b) is below a gene reference value.

[0733] 40. The method of any of embodiments 30, 31 and 37-39, wherein the at least one gene product selected from (a) is ADGRF1, BMPR1B, CA6, CD99, CHN2, CRLF2, DENND3, ENAM, GBP5, GLI2, IFITM1, IGJ (JCHAIN), LDB3, L0645744, MDF1C, MUC4, NRXN3, PON2, S100Z, SEMA6A, SLC37A3, SLC2A5, SPATS2L, TMEM154, TP53INP1, TTYH2 or WNT9A, or is a portion of fragment of any of the foregoing.

[0734] 41. The method of any of embodiments 3-40, wherein the at least one gene product selected from (a) is ADGRF1, CA6, CCL17, CCR6, ENAM, GAS6, GBP5, GLI2, IFITM1, IGJ (JCHAIN), MUC4, PON2, PTP4A3, SEMA6A, SLC37A3, SPATS2L, TMEM154, TP53INP1, IL2RA, or WNT9A or is a portion or fragment of any of the foregoing.

[0735] 42. The method of any of embodiments 3-41, wherein the at least one gene product selected from (b) is ASAP2, FMNL2, GPR176, MDFI, PCDHGA12, PCDHGA6, PCDHGB5, PCDHGB6, PINLYP, PTCH1, ATP9A, HMX3, DPYSL3, ZNF415, IRX5, TMPRSS15, IL3RA, IGF2BP1, or TTC28 or is a portion or fragment of any of the foregoing.

[0736] 43. The method of any of embodiments 1-42, wherein the subject is a human and/or the one or more gene products is human.

[0737] 44. The method of any of embodiments 3-31 and 37-43, wherein at least one of the one or more gene products is from (a) and at least one of the one or more gene products is from (b).

[0738] 45. The method of any of embodiments 1-44, wherein the one or more genes comprises at least one gene from (a) that is IGJ (JCHAIN), MUC4, CA6, WNT9A, ADGRF1 or CCL17, or a portion or fragment of any of the foregoing.

[0739] 46. The method of any of embodiments 1-45, wherein the one or more genes comprises at least one gene from (a) that is CCL17 or a portion or fragment thereof.

[0740] 47. The method of any of embodiments 1-46, wherein the one or more genes comprises at least one gene from (b) that is PINLYP, ASAP2, FMNL2, PTCH1, TTC28, PCDHGA6, PCDHGB6 or PCDHGA12, or a portion or fragment of any of the foregoing.

[0741] 48. The method of any of embodiments 1-47, wherein the one or more genes comprises at least one gene from (b) that is PINLYP or PCDHGA12 or a portion or fragment of any of the foregoing.

[0742] 49. The method of any of embodiments 16-48, wherein:

[0743] greater than or greater than about 30%, 35%, 40%, or 50% of the subjects treated according to the method do not exhibit any grade of cytokine release syndrome (CRS) or neurotoxicity; and/or

[0744] at least at or about 45, 50, 60, 65, 70, 75, 80, 85, 90, 95% or about 100% of subjects treated according to the method do not exhibit severe CRS, optionally grade 3 or higher, prolonged grade 3 or higher or grade 4 or 5 CRS; and/or

[0745] at least at or about 45, 50, 60, 65, 70, 75, 80, 85, 90, 95% or about 100% of subjects treated according to the method do not exhibit severe neurotoxicity, optionally grade 3 or higher, prolonged grade 3 or higher or grade 4 or 5 neurotoxicity; and/or

[0746] at least at or about 45, 50, 60, 65, 70, 75, 80, 85, 90, 95% or about 100% of subjects treated according to the method do not exhibit cerebral edema.

[0747] 50. The method of any of embodiments 16-49, wherein:

[0748] prior to initiation of administration of the dose of cells, the subject has not been administered an agent or treatment capable of treating, preventing, delaying, reducing or attenuating the development or risk of development of a toxicity; and/or

[0749] the subject is not administered an agent or treatment for the treatment or prevention or reduction or attenuation of a neurotoxicity and/or a cytokine release syndrome or risk thereof, within a period of time following administration of the dose, which period of time is optionally at or about 1, 2, 3, 4, 5 days or is optionally at or about 6, 7, 8, 9, 10, 11 days or is optionally 1 or 2 or 3 or 4 weeks; and/or

[0750] the subject is not administered an agent or treatment for the treatment or prevention or reduction or attenuation of a neurotoxicity and/or a cytokine release syndrome or risk thereof, following administration of the dose, prior to or unless the subject exhibits a sign or symptom of the toxicity and/or prior to or unless the subject exhibits a sign or symptom of the toxicity other than a fever, optionally wherein the fever is not a sustained fever or the fever is or has been reduced or reduced by more than 1° C. after treatment with an antipyretic; and/or

[0751] the administration and any follow-up is carried out on an outpatient basis and/or without admitting the subject to a hospital and/or without an overnight stay at a hospital and/or without requiring admission to or an overnight stay at a hospital, optionally unless or until the subject exhibits a sustained fever or a fever that is or has not been reduced or not reduced by more than 1° C. after treatment with an antipyretic.

[0752] 51. The method of any of embodiments 16-50, wherein:

[0753] prior to initiation of administration of the dose of cells, the subject has not been administered an anti-IL-6 or anti-IL-6R antibody, optionally tocilizumab or siltuximab, and/or has not been administered a steroid, optionally dexamethasone

[0754] the subject is not administered an anti-IL-6 or anti-IL-6R antibody, optionally tocilizumab or siltuximab, and/or has not been administered a steroid, optionally dexamethasone, within a period of time following administration of the dose, which period of time is optionally at or about 1, 2, 3, 4, 5 days or is optionally at or about 6, 7, 8, 9, 10, 11 days or is optionally 1 or 2 or 3 or 4 weeks; and/or

[0755] the subject is not administered an anti-IL-6 or anti-IL-6R antibody, optionally tocilizumab or siltuximab, and/or has not been administered a steroid, optionally dexamethasone, following administration of the cell dose, prior to, or unless, the subject exhibits a sign or symptom of a toxicity, optionally a neurotoxicity or CRS, and/or prior to, or unless, the subject exhibits a sign or symptom of a toxicity, optionally a neurotoxicity or CRS, other than a fever, optionally wherein the fever is not a sustained fever or the fever is or has been reduced or reduced by more than 1° C. after treatment with an antipyretic; and/or the administration and any follow-up is carried out on an outpatient basis and/or without admitting the subject to a hospital and/or without an overnight stay at a hospital and/or without requiring admission to or an overnight stay at a hospital, optionally unless or until the subject exhibits a sustained fever or a fever that is or has not been reduced or not reduced by more than 1° C. after treatment with an antipyretic.

[0756] 52. The method of any of embodiments 16-51, wherein:

[0757] the administration is carried out on an outpatient basis and/or without requiring admission to or an overnight stay at a hospital; and

[0758] if the subject exhibits a sustained fever or a fever that is or has not been reduced or not reduced by more than 1° C. after treatment with an antipyretic, the subject is admitted to the hospital or to an overnight stay at a hospital and/or is administered an agent or treatment for the treatment or prevention or reduction or attenuation of a neurotoxicity and/or a cytokine release syndrome or risk thereof.

[0759] 53. The method of any of embodiments 1-52, wherein the neurotoxicity comprises severe neurotoxicity, optionally at or above grade 4 or grade 5 or at least prolonged grade 3 neurotoxicity.

[0760] 54. The method of any of embodiments 1-53, wherein the neurotoxicity is associated with cerebral edema.

[0761] 55. The method of any of embodiments 1-54, wherein the ALL is adult ALL or pediatric ALL.

[0762] 56. The method of any of embodiments 1-55, wherein the sample is a tumor sample and/or the sample comprises or is likely to comprise tumor cells.

[0763] 57. The method of any of embodiments 1-56, wherein the sample is or comprises a bone marrow sample, blood sample, plasma sample, or serum sample.

[0764] 58. The method of any of embodiments 1-57, wherein the sample is or comprises a bone marrow sample.

[0765] 59. The method of embodiment 58, wherein the sample is or comprises a bone marrow aspirate.

[0766] 60. The method of any of embodiments 1-59, wherein the presence, absence or level of expression of one, two, three, four, five, six, seven, eight, nine, ten or more gene products is assessed or compared.

[0767] 61. The method of any of embodiments 1-60, wherein the one or more gene products or portion or fragment thereof is a polynucleotide or a portion thereof.

[0768] 62. The method of embodiment 61, wherein the polynucleotide is an RNA.

[0769] 63. The method of embodiment 61 or embodiment 62, wherein the one or more gene products or portions thereof is an messenger RNA (mRNA) transcript or a partial transcript thereof.

[0770] 64. The method of embodiment 63, wherein the one or more gene products is assessed from complementary DNA (cDNA), optionally based on the mRNA transcript or partial transcript thereof.

[0771] 65. The method of embodiment 64, wherein the cDNA is prepared by PCR amplification, optionally by RT-PCR or quantitative PCR, of the mRNA transcript or partial transcript thereof.

[0772] 66. The method of any of embodiments 1-63, wherein the presence, absence or level of expression of the one or more gene products or portions thereof is assessed by polymerase chain reaction (PCR), northern blotting, microarray, and/or a sequencing technique.

[0773] 67. The method of any of embodiments 1-58, wherein the one or more gene products or portions thereof comprise a protein or a portion thereof.

[0774] 68. The method of embodiment 67, wherein the presence, absence or level of expression of the one or more gene products or portions thereof is measured by an immunoassay, nucleic acid-based or protein-based aptamer techniques, high precision liquid chromatography (HPLC), peptide sequencing, and/or mass spectrometry.

[0775] 69. The method of embodiment 67 or embodiment 68, wherein the presence, absence or level of the one or more gene products or portions thereof is measured by immunoassay and the immunoassay is selected from enzyme-linked immunosorbent assay (ELISA), enzyme immunoassay (EIA), radioimmunoassay (RIA), surface plasmon resonance (SPR), Western Blot, Lateral flow assay, immunohistochemistry, protein array or immuno-PCR iPCR).

[0776] 70. The method of any of embodiments 1-69, wherein the gene reference value, or each of the gene reference values individually for each of the at least one or more gene product, is determined by application of an algorithm to the level, concentration or amount of expression in a control sample, or the average of such level, concentration or amount of expression among a plurality of control samples.

[0777] 71. The method of any of embodiments 1-70, wherein the gene reference value for the at least one gene product of (a), or each of the gene reference values individually for each of the at least one or more gene product of (a), is a value that:

[0778] i) is within 25%, within 20%, within 15%, within 10%, or within 5% above the average level, concentration or amount, and/or is within a standard deviation above the average level, concentration or amount, of the at least one gene product in a plurality of control samples;

[0779] ii) is above the highest level, concentration or amount of the at least one gene product, optionally within 50%, within 25%, within 20%, within 15%, within 10%, or within 5% above such highest level, concentration or amount, measured in at least one sample from among a plurality of control samples; and/or

[0780] iii) is above the highest level, concentration or amount of the at least one gene product as measured among more than 75%, 80%, 85%, 90%, or 95%, or 98% of samples from a plurality of control samples;

[0781] wherein the plurality of control samples are a plurality of biological samples obtained from a group of subjects prior to receiving a immunotherapy for treating a disease or condition, optionally ALL, wherein each of the subjects of the group went on to develop severe neurotoxicity, optionally grade 3 or higher, prolonged grade 3 or higher or grade 4 or 5 neurotoxicity, after receiving the immunotherapy for treating the same disease or condition.

[0782] 72. The method of embodiment 71, further wherein the gene reference value for the at least one gene product of (a), or each of the gene reference values individually for each of the at least one or more gene product of (a), is:

[0783] below the lowest level, concentration, or amount, optionally within 50%, within 25%, within 20%, within 15%, within 10%, or within 5% below the lowest level, concentration or amount, of the at least one gene product observed in a sample from among a second plurality of control samples; and/or

[0784] below the level, concentration or amount of the at least one gene product measured as measured in more than 75%, 80%, 85%, 90%, 95%, or 98% of samples from among a second plurality of control samples

[0785] wherein the second plurality of control samples is obtained from a group of subjects prior to receiving the same immunotherapy for treating the same disease or condition, wherein each of the subjects of the group did not develop severe neurotoxicity, optionally wherein each of the subjects developed grade 3 or less, grade 2 or less, or grade 1 or 0 neurotoxicity, after receiving the immunotherapy for treating the same disease or condition.

[0786] 73. The method of any of embodiments 1-70, wherein the gene reference value for the at least one gene product of (a), or each of the gene reference values individually for each of the at least one or more gene product of (a), is a value that:

[0787] i) is within 25%, within 20%, within 15%, within 10%, or within 5% above the average level, concentration or amount, and/or is within a standard deviation above the average level, concentration or amount, of the at least one gene product in a plurality of control samples;

[0788] ii) is above the highest level, concentration or amount of the at least one gene product, optionally within 50%, within 25%, within 20%, within 15%, within 10%, or within 5% above such highest level, concentration or amount, as measured in at least one sample from among a plurality of control samples; and/or

[0789] iii) is above the highest level, concentration or amount of the at least one gene product measured among more than 75%, 80%, 85%, 90%, 95%, or 98% of samples from a plurality of control samples;

[0790] wherein the plurality of control samples are a plurality of biological samples obtained from a group of subjects prior to receiving a immunotherapy for treating a disease or condition, optionally ALL, wherein each of the subjects of the group has ALL that is not Philadelphia chromosome positive (PH+) or Philadelphia-like (Ph-like) subtype of ALL.

[0791] 74. The method of embodiment 73, further wherein the gene reference value for the at least one gene product of (a), or each of the gene reference values individually for each of the at least one or more gene product of (a), is:

[0792] below the lowest level, concentration, or amount, optionally within 50%, within 25%, within 20%, within 15%, within 10%, or within 5% below the lowest level, concentration or amount, of the at least one gene product observed in a sample from among a second plurality of control samples; and/or

[0793] below the level, concentration or amount measured in more than 75%, 80%, 85%, 90%, 95%, or 98% of samples from among a plurality of control samples,

[0794] wherein the second plurality of control samples is obtained from a group of subjects prior to receiving the same immunotherapy for treating the same disease or condition, wherein each of the subjects has ALL that is Philadelphia chromosome positive (Ph+) or Philadelphia-like (Ph-like) subtype of ALL.

[0795] 75. The method of any of embodiments 1-74, wherein the gene reference value for the at least one gene product of (b), or each of the gene reference values individually for each of the at least one or more gene product of (b), is a value that:

[0796] i) is within 25%, within 20%, within 15%, within 10%, or within 5% below the average level, concentration or amount, and/or is within a standard deviation below the average level, concentration or amount, of the at least one gene product in a plurality of control samples;

[0797] ii) is below the lowest level, concentration or amount of the at least one gene product, optionally within 50%, within 25%, within 20%, within 15%, within 10%, or within 5% below the lowest level, concentration or amount, as measured in at least one sample from among a plurality of control samples;

[0798] iii) is below the lowest level, concentration or amount of the at least one gene product measured among more than 75%, 80%, 85%, 90%, 95%, or 98% of samples from a plurality of control samples;

[0799] wherein the plurality of control samples are a plurality of biological samples obtained from a group of subjects prior to receiving a immunotherapy for treating a disease or condition, wherein each of the subjects of the group went on to develop severe neurotoxicity, optionally grade 3 or higher, prolonged grade 3 or higher or grade 4 or 5 neurotoxicity, after receiving the immunotherapy for treating the same disease or condition.

[0800] 76. The method of embodiment 75, further wherein the gene reference value for the at least one gene product of (b), or each of the gene reference values individually for each of the at least one or more gene product of (b) is:

[0801] above the highest level, concentration, or amount of the at least one gene product, optionally within 50%, within 25%, within 20%, within 15%, within 10%, or within 5% above such level, concentration or amount, measured in at least one sample from among a second plurality of control samples; and/or

[0802] above the level, concentration or amount of the at least one gene product measured in more than 75%, 80%, 85%, 90%, 95%, or 98% of samples from among a second plurality of control samples,

[0803] wherein the second plurality of control samples are a plurality of control samples obtained from a group of subjects prior to receiving the immunotherapy for treating the disease or condition, wherein each of the subjects of the group did not develop severe neurotoxicity, optionally wherein each of the subjects developed grade 3 or less, grade 2 or less, or grade 1 or 0 neurotoxicity, after receiving the immunotherapy for treating the same disease or condition.

[0804] 77. The method of any of embodiments 1-74, wherein the gene reference value for the at least one gene product of (b), or each of the gene reference values individually for each of the at least one or more gene product of (b), is a value that:

[0805] i) is within 25%, within 20%, within 15%, within 10%, or within 5% below the average level, concentration or amount, and/or is within a standard deviation below the average level, concentration or amount, of the at least one gene product in a plurality of control samples;

[0806] ii) is below the lowest level, concentration or amount of the at least one gene product, optionally within 50%, within 25%, within 20%, within 15%, within 10%, or within 5% below such lowest level, concentration or amount, as measured in at least one sample from among a plurality of control samples;

[0807] iii) is below the lowest level, concentration or amount of the at least one gene product measured among more than 75%, 80%, 85%, 90%, 95%, or 98% of samples from a plurality of control samples;

[0808] wherein the plurality of control samples are a plurality of biological samples obtained from a group of subjects prior to receiving a immunotherapy for treating a disease or condition, optionally ALL, wherein each of the subjects of the group has ALL that is not Philadelphia chromosome positive (PH+) or Philadelphia-like (Ph-like) subtype of ALL.

[0809] 78. The method of embodiment 77, further wherein the gene reference value for the at least one gene product of (b), or each of the gene reference values individually for each of the at least one or more gene product of (b) is:

[0810] above the highest level, concentration, or amount of the at least one gene product, optionally within 50%, within 25%, within 20%, within 15%, within 10%, or within 5% above such level, concentration or amount, measured in at least one sample from among a second plurality of control samples; and/or

[0811] is above the level, concentration or amount of the at least one gene product measured among more than 75%, 80%, 85%, 90%, 95%, or 98% of samples from a second plurality of control samples,

[0812] wherein the second plurality of control samples are a plurality of control samples obtained from a group of subjects prior to receiving the immunotherapy for treating the same disease or condition, wherein each of the subjects has ALL that is Philadelphia chromosome positive (Ph+) or Philadelphia-like (Ph-like) subtype of ALL.

[0813] 79. The method of any of embodiments 70-78, wherein the control sample or the plurality of control samples are obtained from one or more subjects who have ALL.

[0814] 80. The method of any of embodiments 70-79, wherein the control sample or each of the plurality of control samples is from the same biological sample being assessed, optionally is a bone marrow sample.

[0815] 81. The method of any of embodiments 70-80, wherein the plurality of control samples comprises at least 3, at least 10, at least 20, at least 50, or at least 100 control samples.

[0816] 82. The method of any of embodiments 1-81, wherein the immunotherapy is a cell therapy comprising cells engineered to express a recombinant receptor, optionally a CAR, wherein the risk or likely risk of the subject developing neurotoxicity following administration of the cell therapy is further based on the value of a parameter that indicates or correlates with the degree of recombinant receptor-dependent, optionally CAR-dependent, activity of the composition, wherein if the value of the parameter is at or greater than a threshold value the subject is at risk of developing neurotoxicity following administration of the immunotherapy when administered to the subject.

[0817] 83. The method of embodiment 82, wherein the recombinant receptor-dependent activity comprises a measure of the production or accumulation of one or more of a proinflammatory cytokine, or a normalized value thereof 84. The method of embodiment 83, wherein the proinflammatory cytokine is TNF-alpha, IFN-gamma, IL-2, IL-10, or a combination thereof.

[0818] 85. The method of embodiment 83 or 84, wherein the measure is in an assay involving culture or incubation for a fixed time, optionally 24 hours, of cells of the immunotherapy or sample thereof in the presence of an antigen that binds to the recombinant receptor, cells expressing an antigen that binds to the recombinant receptor, and/or an agent that binds to a recombinant receptor.

[0819] 86. The method of embodiment 85, wherein the assay is an ELISA.

[0820] 87. The method of any of embodiment 83-86, wherein the measure of the proinflammatory cytokine is:

[0821] (i) a concentration, relative concentration, amount, or relative amount of the cytokine; or

[0822] (ii) an amount or relative amount of the cytokine per number of cells of the therapeutic T cell composition, optionally the number of CAR+ T cells of the therapeutic T cell composition; or

[0823] (iii) an amount or relative amount of the cytokine per unit of input cells of the given composition per unit of time, optionally one hour; or

[0824] (iv) a level indicative of any of (i)-(iii).

[0825] 88. The method of any of embodiments 82-87, wherein the threshold value of the recombinant receptor-dependent activity is:

[0826] i) within 25%, within 20%, within 15%, within 10%, or within 5% below the measure of the recombinant receptor-dependent activity, and/or is within a standard deviation below the such measure, in a plurality of reference compositions;

[0827] ii) is below the lowest measure of the recombinant receptor-dependent activity, optionally within 50%, within 25%, within 20%, within 15%, within 10%, or within 5% below such lowest measure, in a composition from among a plurality of reference compositions;

[0828] iii) is below the measure of the lowest recombinant receptor-dependent activity among more than 75%, 80%, 85%, 90%, 95%, or 98% of samples from a plurality of reference compositions;

[0829] wherein the plurality of reference compositions are a plurality of compositions of the cell therapy comprising T cells expressing the recombinant receptor, optionally the CAR, from among a group of subjects that went on to receive the cell therapy for treating the same a disease or condition, optionally the same disease or condition, optionally ALL, those subjects in the group that went on to develop severe neurotoxicity, optionally grade 3 or higher, prolonged grade 3 or higher or grade 4 or 5 neurotoxicity.

[0830] 89. The method of any of embodiments 1-88, wherein the immunotherapy specifically binds to an antigen associated with the disease or condition or expressed in cells of the environment of a lesion associated with the disease or condition.

[0831] 90. The method of embodiment 89, wherein the disease or condition is a cancer.

[0832] 91. The method of embodiment 89 or 90, wherein the disease or condition is a myeloma, leukemia or lymphoma.

[0833] 92. The method of any of embodiments 89-91, wherein the disease or condition is a B cell malignancy and/or is acute lymphoblastic leukemia (ALL), adult ALL, chronic lymphoblastic leukemia (CLL), non-Hodgkin lymphoma (NHL), and Diffuse Large B-Cell Lymphoma (DLBCL).

[0834] 93. The method of any of embodiments 89-92, wherein the disease or condition is acute lymphoblastic leukemia (ALL), optionally adult ALL or pediatric ALL.

[0835] 94. The method of any of embodiments 89-93, wherein the target antigen is selected from among Trophoblast glycoprotein (TPBG also known as 5T4), 8H9, avb6 integrin, B7-H3, B7-H6, B cell maturation antigen (BCMA), carbonic anhydrase 9 (CA9, also known as CAIX or G250), a cancer-testes antigen, carbonic anhydrase 9 (CAIX), C-C Motif Chemokine Ligand 1 (CCL-1), CD19, CD20, CD22, CEA, hepatitis B surface antigen, CD23, CD24, CD30, CD33, CD38, CD44, CD44v6, CD44v7/8, CD123, CD133, CD138, CD171, carcinoembryonic antigen (CEA), CE7, a cyclin, cyclin A2, c-Met, dual antigen, chondroitin sulfate proteoglycan 4 (CSPG4), epidermal growth factor protein (EGFR), epithelial glycoprotein 2 (EPG-2), epithelial glycoprotein 40 (EPG-40), ephrin receptor A2 (EPHa2), ephrinB2, erb-B2, erb-B3, erb-B4, erbB dimers, epidermal growth factor protein (EGFR vIII), estrogen receptor, fetal acetylcholine receptor (Fetal AchR), folate receptor alpha, folate binding protein (FBP), ephrin receptor A2 (FCRL5; also known as Fc receptor homolog 5 or FCRH5), fetal acetylcholine receptor, G250/CAIX, ganglioside GD2, ganglioside GD3, glycoprotein 100 (gp100), glypican-3 (GPC3), G Protein Coupled Receptor 5D (GPRC5D), Her2/neu (receptor tyrosine kinase erbB2), Her3 (erb-B3), Her4 (erb-B4), erbB dimers, Human high molecular weight-melanoma-associated antigen (HMW-MAA), hepatitis B surface antigen, Human leukocyte antigen Al (HLA-A1), Human leukocyte antigen A2 (HLA-A2), IL-22 receptor alpha(IL-22R-alpha), IL-13 receptor alpha 2 (IL-13Ra2), kinase insert domain receptor (kdr), kappa light chain, Lewis Y, L1-cell adhesion molecule (L1-CAM), CE7 epitope of L1-CAM, Leucine Rich Repeat Containing 8 Family Member A (LRRC8A), Lewis Y, Melanoma-associated antigen (MAGE)-Al, MAGE-A3, MAGE-A6, MAGE-A10, melan A (MART-1), mesothelin (MSLN), c-Met, murine CMV, mucin 1 (MUC1), MUC16, neural cell adhesion molecule (NCAM), natural killer group 2 member D (NKG2D), NKG2D ligands, cancer/testis antigen 1B (CTAG, also known as NY-ESO-1 and LAGE-2), 0-acetylated GD2 (OGD2), oncofetal antigen, Preferentially expressed antigen of melanoma (PRAME), prostate stem cell antigen (PSCA), progesterone receptor, a prostate specific antigen, prostate specific membrane antigen (PSMA), survivin, Receptor Tyrosine Kinase Like Orphan Receptor 1 (ROR1), tumor-associated glycoprotein 72 (TAG72), Tyrosinase related protein 1 (TRP1, also known as TYRP1 or gp75), Tyrosinase related protein 2 (TRP2, also known as dopachrome tautomerase, dopachrome delta-isomerase or DCT), vascular endothelial growth factor receptor (VEGF receptors or VEGFR), vascular endothelial growth factor receptor 2 (VEGF-R2), Wilms Tumor 1 (WT-1), a pathogen-specific antigen.

[0836] 95. The method of any of embodiment 1-94, wherein the immunotherapy is a T cell-engaging therapy comprising a bispecific antibody, wherein at least one binding portion specifically binds to a T cell antigen.

[0837] 96. The method of embodiment 95, wherein the at least one binding portion specifically binds to CD3.

[0838] 97. The method of embodiment 95 or 96, wherein a second binding portion of the bispecific antibody binds to an antigen, optionally wherein the antigen is CD19.

[0839] 98. The method of any of embodiments 1-97, wherein the immunotherapy is a cell therapy.

[0840] 99. The method of any of embodiments 1-94 or 98, wherein the immunotherapy is a T cell therapy comprising genetically engineered cells expressing a recombinant receptor.

[0841] 100. The method of any of embodiments 82-87, 98, or 99, wherein the recombinant receptor is a T cell receptor or a functional non-T cell receptor.

[0842] 101. The method of any of embodiments 82-87, 98, or 99, wherein the recombinant receptor is a chimeric antigen receptor (CAR).

[0843] 102. The method of any of embodiments 89-96, wherein the recombinant receptor is an anti-CD19 CAR.

[0844] 103. The method of embodiment 101 or 102, wherein the CAR comprises an extracellular antigen-recognition domain that specifically binds to the antigen and an intracellular signaling domain comprising an ITAM, wherein optionally, the intracellular signaling domain comprises an intracellular domain of a CD3-zeta (CD3) chain; and/or wherein the CAR further comprises a costimulatory signaling region, which optionally comprises a signaling domain of CD28 or 4-1BB.

[0845] 104. The method of any of embodiments 82-87 or 99-103, wherein the genetically engineered cells comprise T cells or NK cells.

[0846] 105. The method of any of embodiments 82-87 or 99-104, wherein the engineered cells comprise T cells, and the T cells comprise CD4+ and/or CD8+ T cells.

[0847] 106. The method of embodiment 105, wherein the T cells are primary T cells obtained from a subject.

[0848] 107. The method of any of embodiments 1-106, wherein the immunotherapy comprises the administration of from or from about 1×105 to 1×108 total recombinant receptor-expressing cells, total T cells, or total peripheral blood mononuclear cells (PBMCs), from or from about 5×105 to 1×107 total recombinant receptor-expressing cells, total T cells, or total peripheral blood mononuclear cells (PBMCs) or from or from about 1×106 to 1×107 total recombinant receptor-expressing cells, total T cells, or total peripheral blood mononuclear cells (PBMCs), each inclusive.

[0849] 108. The method of any of embodiments 1-107, wherein the immunotherapy comprises the administration of no more than 1×108 total recombinant receptor-expressing cells, total T cells, or total peripheral blood mononuclear cells (PBMCs), no more than 1×107 total recombinant receptor-expressing cells, total T cells, or total peripheral blood mononuclear cells (PBMCs), no more than 0.5×107 total recombinant receptor-expressing cells, total T cells, or total peripheral blood mononuclear cells (PBMCs), no more than 1×106 total recombinant receptor-expressing cells, total T cells, or total peripheral blood mononuclear cells (PBMCs), no more than 0.5×106 total recombinant receptor-expressing cells, total T cells, or total peripheral blood mononuclear cells (PBMCs).

[0850] 109. A kit, comprising reagents for detecting the expression of two or more gene products or portions thereof in a sample, wherein the two or more gene products are encoded by two or more of ABCA9, ADAMTSL4, ADGRA2, ADGRF1, AKS, APOL1, ARHGAP27, ARID3B, CA6, CABP7, CCDC152, CCL17, CCR1, CCR6, CEP85L, CISH, CR2, CRLF2, ENAM, ENPP2, EPHA4, FTH1P11, FTH1P2, FTH1P8, GADD45A, GAS6, GBP3, GBP5, GBP6, GIMAP1-GIMAPS, GLI2, GPA33, GPRIN3, HSPA1A, IFITM1, IFITM3, IL15, IL2RA, JCHAIN, KIAA1257, LA16c-390H2.4, LAMB1, LDB3, LINC00623, LST1, LTB, LY6E, MAS1, MUC4, NLRC3, PLXNA4, PON2, PTGES3P1, PTP4A3, RNU1-1, RP11-345J4.6, RP11-421N8.1, RP11-51J9.5, RP11-51O6.1, RP11-552F3.9, RP11-686D22.9, RP11-723D22.3, RP11-723O4.6, RP13-512J5.1, RP4-620F22.2, RP5-940J5.9, RP6-109B7.5, RPL21P75, RYR2, SAMD9L, SEMA6A, SLC37A3, SNRPEP4, SOCS1, SPATS2L, SPON1, SV2C, TMEM154, TP53INP1, TNF, TRIM47, UST, WNT9A, ASAP2, ATP8B1, ATP9A, CCNA1, CDHR3, CECR2, CELF4, DLX1, DPYSL3, EHD4, FMNL2, GGA2, GPR176, HHIPL1, HOXA7, HMX3, IGF2BP1, IL3RA, IRX3, IRX5, KCNIP1, KIAA1644, LINC00092, LINC01483, MDFI, MIB1, MMP14, NOM1, OTOA, PCDHGA12, PCDHGA4, PCDHGA6, PCDHGB1, PCDHGBS, PCDHGB6, PINLYP, PPM1E, PRKD1, PROKR2, PRSS12, PRTG, PTCH1, RFX8, RP11-146B14.1, RP11-3P17.5, RP11-41O4.1, RP11-713N11.4, RP4-568B10.1, SERF1A, SEZ6L, SMURF1, TBC1D30, TCF12, TCP11, TM9SF3, TMPRSS15, TMSB15A, TNKS1BP1, TREM2, TTC28, ZNF415, ENG, SELE, ICAM3, PCDHGA9, FMNL1, or IL6R, or a portion or a fragment of any of the forgoing.

[0851] 110. The kit of embodiment 109, wherein the two or more gene products are human gene products.

[0852] 111. The kit of embodiment 109 or 110, wherein the kit comprises reagents for detecting the expression of at least 3, at least 4, at least 5, at least 6, at least 7, at least 8, at least 9, at least 10, at least 11, at least 12, at least 13, at least 14, at least 15, at least 20, at least 25, at least 30, at least 40, or at least 50 gene products.

[0853] 112. The kit of any of embodiments 109-111, wherein the kit comprises reagents for detecting the expression of at least 3 gene products.

[0854] 113. The kit of any of embodiments 109-112, wherein the kit comprises reagents for detecting the expression of at least 5 gene products.

[0855] 114. The kit of any of embodiments 109-113, wherein at least one of the two or more gene products is from a first group of gene products that negatively correlate to a risk of developing neurotoxicity, wherein the first group comprises gene products encoded by ABCA9, ADAMTSL4, ADGRA2, ADGRF1, AKS, APOL1, ARHGAP27, ARID3B, CA6, CABP7, CCDC152, CCL17, CCR1, CCR6, CEP85L, CISH, CR2, ENAM, ENPP2, EPHA4, FTH1P11, FTH1P2, FTH1P8, GADD45A, GAS6, GBP3, GBP5, GBP6, GIMAP1-GIMAPS, GLI2, GPA33, GPRIN3, HSPA1A, IFITM1, IFITM3, IL15, IL2RA, JCHAIN, KIAA1257, LA16c-390H2.4, LAMB1, LDB3, LINC00623, LST1, LTB, LY6E, MAS1, MUC4, NLRC3, PLXNA4, PON2, PTGES3P1, PTP4A3, RNU1-1, RP11-345J4.6, RP11-421N8.1, RP11-51J9.5, RP11-51O6.1, RP11-552F3.9, RP11-686D22.9, RP11-723D22.3, RP11-723O4.6, RP13-512J5.1, RP4-620F22.2, RP5-940J5.9, RP6-109B7.5, RPL21P75, RYR2, SAMD9L, SEMA6A, SLC37A3, SNRPEP4, SOCS1, SPATS2L, SPON1, SV2C, TMEM154, TP53INP1, TNF, TRIM47, UST, WNT9A, ENG, SELE, ICAM3, or IL6R, and portions or a fragments of any of the forgoing.

[0856] 115. The kit of any of embodiments 109-114, wherein at least one of the two or more gene products is a gene product encoded by ADGRF1, CA6, CCL17, CCR6, ENAM, GAS6, GBP5, GLI2, IFITM1, JCHAIN, MUC4, PON2, PTP4A3, SEMA6A, SLC37A3, SPATS2L, TMEM154, TP53INP1, IL2RA, or WNT9A, or is a portion or a fragment of any of the forgoing.

[0857] 116. The kit of any of embodiments 109-115, wherein at least one of the two or more gene products is a gene product encoded by JCHAIN, MUC4, CA6, WNT9A, ADGRF1 or CCL17, or a portion or fragment of any of the foregoing.

[0858] 117. The kit of any of embodiments 109-116, wherein at least one of the two or more gene products is a gene product encoded by CCL17 or is a portion or fragment thereof.

[0859] 118. The kit of any of embodiments 109-117, wherein at least one of the two or more gene products is from a second group of gene products that negatively correlate to a risk of developing neurotoxicity, wherein the second group comprises gene products encoded by ASAP2, ATP8B1, ATP9A, CCNA1, CDHR3, CECR2, CELF4, DLX1, DPYSL3, EHD4, FMNL2, GGA2, GPR176, HHIPL1, HOXA7, HMX3, IGF2BP1, IL3RA, IRX3, IRX5, KCNIP1, KIAA1644, LINC00092, LINC01483, MDFI, MIB1, MMP14, NOM1, OTOA, PCDHGA12, PCDHGA4, PCDHGA6, PCDHGB1, PCDHGBS, PCDHGB6, PINLYP, PPM1E, PRKD1, PROKR2, PRSS12, PRTG, PTCH1, RFX8, RP11-146B14.1, RP11-3P17.5, RP11-41O4.1, RP11-713N11.4, RP4-568B10.1, SERF1A, SEZ6L, SMURF1, TBC1D30, TCF12, TCP11, TM9SF3, TMPRSS15, TMSB15A, TNKS1BP1, TREM2, TTC28, PCDHGA9, FMNL1, and ZNF415, or portions or a fragments of any of the forgoing.

[0860] 119. The kit of any of embodiments 109-118, wherein at least one of the two or more gene products is a gene product encoded by ASAP2, FMNL2, GPR176, MDFI, PCDHGA12, PCDHGA6, PCDHGBS, PCDHGB6, PINLYP, PTCH1, ATP9A, HMX3, DPYSL3, ZNF415, IRX5, TMPRSS15, IL3RA, IGF2BP1, or TTC28, or is a portion or fragment of any of the foregoing.

[0861] 120. The kit of any of embodiments 109-119, wherein at least one of the two or more gene products is a gene product encoded by PINLYP, ASAP2, FMNL2, PTCH1, TTC28, PCDHGA6, PCDHGB6 or PCDHGA12, or a portion or fragment of any of the foregoing.

[0862] 121. The kit of any of embodiments 109-120, wherein at least one of the two or more gene products is a gene product encoded by PINLYP or PCDHGA12, or a portion or fragment of any of the foregoing.

[0863] 122. The kit of any of embodiments 109-121 wherein at least one of the two or more gene products is a gene product, or a portion or fragment thereof, from the first group of gene products that negatively correlate to a risk of developing neurotoxicity and at least one of the gene products is a gene product, or a portion or fragment thereof, from the second group of gene products that positively correlate to a risk of developing neurotoxicity.

[0864] 123. The kit of embodiment 122, wherein the at least one of the gene products from the first group is a gene product encoded by ADGRF1, CA6, CCL17, CCR6, ENAM, GAS6, GBP5, GLI2, IFITM1, JCHAIN, MUC4, PON2, PTP4A3, SEMA6A, SLC37A3, SPATS2L, TMEM154, TP53INP1, IL2RA, or WNT9A, or is a portion or a fragment of any of the forgoing.

[0865] 124. The kit of embodiment of embodiment 122 or 123, wherein the at least one of the gene products from the first group is a gene product encoded by JCHAIN, MUC4, CA6, WNT9A, ADGRF1 or CCL17, or a portion or fragment of any of the foregoing.

[0866] 125. The kit of any of embodiments 122-124, wherein the at least one of the gene products from the first group is a gene product encoded by CCL17 or is a portion or fragment thereof.

[0867] 126. The kit of any of embodiments 122-125, wherein the at least one of the gene products from the second group is a gene product encoded by ASAP2, FMNL2, GPR176, MDFI, PCDHGA12, PCDHGA6, PCDHGBS, PCDHGB6, PINLYP, PTCH1, ATP9A, HMX3, DPYSL3, ZNF415, IRX5, TMPRSS15, IL3RA, IGF2BP1, or TTC28, or is a portion or fragment of any of the foregoing.

[0868] 127. The kit of any of embodiments 122-126, wherein the at least one of the gene products from the second group is a gene product encoded by ASAP2, FMNL2, GPR176, MDFI, PCDHGA12, PCDHGA6, PCDHGBS, PCDHGB6, PINLYP, PTCH1, ATP9A, HMX3, DPYSL3, ZNF415, IRX5, TMPRSS15, IL3RA, IGF2BP1, or TTC28, or is a portion or fragment of any of the foregoing.

[0869] 128. The kit of any of embodiments 122-127, wherein the at least one of the gene products from the second group is a gene product encoded by PINLYP, ASAP2, FMNL2, PTCH1, TTC28, PCDHGA6, PCDHGB6 or PCDHGA12, or a portion or fragment of any of the foregoing.

[0870] 129. The kit of any of embodiments 122-128, wherein the at least one of the gene products from the second group is a gene product encoded by PINLYP or PCDHGA12, or a portion or fragment of any of the foregoing.

[0871] 130. The kit of embodiment 122, wherein the at least one of the gene products from the first group is a gene product encoded by ADGRF1, CA6, CCL17, CCR6, ENAM, GAS6, GBP5, GLI2, IFITM1, JCHAIN, MUC4, PON2, PTP4A3, SEMA6A, SLC37A3, SPATS2L, TMEM154, TP53INP1, IL2RA, or WNT9A, or is a portion or a fragment of any of the forgoing; and wherein the at least one of the gene products from the second group is a gene product encoded by ASAP2, FMNL2, GPR176, MDFI, PCDHGA12, PCDHGA6, PCDHGB5, PCDHGB6, PINLYP, PTCH1, ATP9A, HMX3, DPYSL3, ZNF415, IRX5, TMPRSS15, IL3RA, IGF2BP1, or TTC28, or is a portion or fragment of any of the foregoing.

[0872] 131. The kit of embodiment 122 or 130, wherein the at least one of the gene products from the first group is a gene product encoded by JCHAIN, MUC4, CA6, WNT9A, ADGRF1 or CCL17, or a portion or fragment of any of the foregoing; and wherein the at least one of the gene products from the second group is a gene product encoded by PINLYP, ASAP2, FMNL2, PTCH1, TTC28, PCDHGA6, PCDHGB6 or PCDHGA12, or a portion or fragment of any of the foregoing.

[0873] 132. The kit of any of embodiments 122, 130, 131, wherein the at least one of the gene products from the first group is a gene product encoded by CCL17 or is a portion or fragment thereof; and

[0874] wherein the at least one of the gene products from the second group is a gene product encoded by PINLYP or PCDHGA12, or a portion or fragment thereof.

[0875] 133. The kit of any of embodiments 109-132, wherein the two or more gene products are or comprise mRNA.

[0876] 134. The kit of embodiment 133, further comprising a reverse transcriptase, a DNA polymerase, and/or dNTPs wherein the two or more gene products are detected by a PCR reaction, optionally RT-PCR or quantitative PCR

[0877] 135. The kit of any of embodiments 109-122, wherein at least one of the two or more gene products is a gene product expressed by CCL17, CCR6, GAS6, GL12, PTP4A3, or IL2RA, or a portion or fragment thereof.

[0878] 136. The kit of embodiment 134 or 135, wherein the reagents comprise oligonucleotide primers that are complementary to, bind to, and/or are capable of binding to the one or more mRNA gene products.

[0879] 137. The kit of any of embodiments 135-136, wherein the oligonucleotide primers are between 10 and 30 nucleotides in length, optionally between 15 and 25 nucleotides in length.

[0880] 138. The kit of any of clams 133-137, wherein the reagents comprise one or more oligionucleotide and/or polynucleotide probes that are to, bind to, and/or are capable of binding to the one or more mRNA gene products.

[0881] 139. The kit of any of embodiments 134-138, wherein probes are between 25 and 1,000 nucleotides in length, optionally between 50 and 500 nucleotides in length, between 50 and 200 nucleotides in length, between 100-300 nucleotides in length, or between 300 and 700 nucleotides in length.

[0882] 140. The kit of any of embodiments 134-139, wherein the probes are tagged with a label, and wherein the label is detectable when the probe is bound to the mRNA gene product and/or cDNA derived from an RNA gene product.

[0883] 141. The kit of any of embodiments 134-140, wherein the rt-PCR reaction is a multiplex rt-PCR reaction, optionally wherein the multiplex reaction detects two, three, four, five, or more than five RNA gene products, and/or cDNA derived from the RNA gene products.

[0884] 142. The kit of embodiment 133, wherein the two or more RNA gene products are detected by a microarray.

[0885] 143. The kit of embodiment 142, comprising an array, wherein the array comprises at least 5 reagents immobilized on a solid support, wherein each of the reagents:

[0886] are or comprise nucleic acid probes that bind to, are capable of binding to, and/or are complementary to the mRNA gene product and/or cDNA derived from an RNA gene product;

[0887] have a length of between 20 to 500 nucleotides. 144. The kit of embodiment 133, wherein the two or more RNA gene products are detected by RNA-seq.

[0888] 145. The kit of any of embodiments 109-132, wherein the two or more gene products are or comprise proteins or variants or fragments thereof.

[0889] 146. The kit of embodiment 145, wherein the protein gene product are detected by an immunoassay, optionally an immunoassay selected from enzyme-linked immunosorbent assay (ELISA), enzyme immunoassay (EIA), radioimmunoassay (RIA), surface plasmon resonance (SPR), Western Blot, Lateral flow assay, immunohistochemistry, protein array or immuno-PCR iPCR).

[0890] 147. The kit of embodiments 145 or 146, wherein the reagents are or comprise antibodies or antigen binding fragments or variants thereof, wherein the antibodies or the antigen binding fragments or variants thereof bind to and/or are capable of binding to the protein gene products.

[0891] 148. The kit of embodiment 147, the antibodies or the antigen binding fragments or variants thereof each comprise a bound or attached detectable label.

[0892] 149 The kit of any of embodiment 148, wherein the detectable label is a fluorescent label, optionally wherein the fluorescent label comprises Alexa Fluor 346, Alexa Fluor 405, Alexa Fluor 430, Alexa Fluor 488, Alexa Fluor 647, Alexa Fluor 555, Alexa Fluor 568, Alexa Fluor 700, R-phycoerythrin, Aqua, Texas-Red, FITC, rhodamine, a rhodamine derivative, fluorescein, a fluorescein derivative, cascade blue, Cy5 or Cy3.

[0893] 150. The kit of any of embodiments 109-149, further comprising an antibody or antigen-binding fragment thereof that binds to and/or is capable of binding to a proinflammatory cytokine.

[0894] 151. The method of embodiment 150, wherein the proinflammatory cytokine is TNF-alpha, IFN-gamma, IL-2, IL-10, or a combination thereof.

[0895] 152. The kit of embodiment 150 or 151, wherein proinflammatory cytokine is TNF-alpha.

[0896] 153. The kit of any embodiments 150-152, wherein the proinflammatory cytokine is detected with ELISA; optionally wherein the kit further comprises a solid support comprising a plurality of wells, and wherein the antibody or antigen-binding fragment thereof that binds the proinflammatory cytokine is bound to the solid support, optionally at the inside of the wells.

[0897] 154. The kit of any of embodiments 109-153, further comprising an immunotherapy.

[0898] 155. The kit of embodiment 154, wherein the immunotherapy is a cell therapy or is a T cell-engaging therapy, optionally wherein the cell therapy comprises cells engineered to express a recombinant receptor.

[0899] 156. The kit of embodiment 154 or 155, wherein the immunotherapy specifically binds to an antigen associated with a disease or condition and/or expressed in cells associated with the disease or condition.

[0900] 157. The kit of embodiment 156, wherein the disease or condition is a cancer.

[0901] 158. The kit of embodiment 156 or 157, wherein the disease or condition is a myeloma, leukemia or lymphoma.

[0902] 159. The kit of any of embodiments 156-158, wherein the disease or condition is a B cell malignancy and/or is acute lymphoblastic leukemia (ALL), adult ALL, chronic lymphoblastic leukemia (CLL), non-Hodgkin lymphoma (NHL), and Diffuse Large B-Cell Lymphoma (DLBCL).

[0903] 160. The kit of any of embodiments 156-159, wherein the target antigen is selected from among Trophoblast glycoprotein (TPBG also known as 5T4), 8H9, avb6 integrin, B7-H3, B7-H6, B cell maturation antigen (BCMA), carbonic anhydrase 9 (CA9, also known as CAIX or G250), a cancer-testes antigen, carbonic anhydrase 9 (CAIX), C-C Motif Chemokine Ligand 1 (CCL-1), CD19, CD20, CD22, CEA, hepatitis B surface antigen, CD23, CD24, CD30, CD33, CD38, CD44, CD44v6, CD44v7/8, CD123, CD133, CD138, CD171, carcinoembryonic antigen (CEA), CE7, a cyclin, cyclin A2, c-Met, dual antigen, chondroitin sulfate proteoglycan 4 (CSPG4), epidermal growth factor protein (EGFR), epithelial glycoprotein 2 (EPG-2), epithelial glycoprotein 40 (EPG-40), ephrin receptor A2 (EPHa2), ephrinB2, erb-B2, erb-B3, erb-B4, erbB dimers, epidermal growth factor protein (EGFR vIII), estrogen receptor, fetal acetylcholine receptor (Fetal AchR), folate receptor alpha, folate binding protein (FBP), ephrin receptor A2 (FCRL5; also known as Fc receptor homolog 5 or FCRH5), fetal acetylcholine receptor, G250/CAIX, ganglioside GD2, ganglioside GD3, glycoprotein 100 (gp100), glypican-3 (GPC3), G Protein Coupled Receptor 5D (GPRC5D), Her2/neu (receptor tyrosine kinase erbB2), Her3 (erb-B3), Her4 (erb-B4), erbB dimers, Human high molecular weight-melanoma-associated antigen (HMW-MAA), hepatitis B surface antigen, Human leukocyte antigen A1 (HLA-A1), Human leukocyte antigen A2 (HLA-A2), IL-22 receptor alpha(IL-22R-alpha), IL-13 receptor alpha 2 (IL-13Ra2), kinase insert domain receptor (kdr), kappa light chain, Lewis Y, L1-cell adhesion molecule (L1-CAM), CE7 epitope of Ll-CAM, Leucine Rich Repeat Containing 8 Family Member A (LRRC8A), Lewis Y, Melanoma-associated antigen (MAGE)-A1, MAGE-A3, MAGE-A6, MAGE-A10, melan A (MART-1), mesothelin (MSLN), c-Met, murine CMV, mucin 1 (MUC1), MUC16, neural cell adhesion molecule (NCAM), natural killer group 2 member D (NKG2D), NKG2D ligands, cancer/testis antigen 1B (CTAG, also known as NY-ESO-1 and LAGE-2), 0-acetylated GD2 (OGD2), oncofetal antigen, Preferentially expressed antigen of melanoma (PRAME), prostate stem cell antigen (PSCA), progesterone receptor, a prostate specific antigen, prostate specific membrane antigen (PSMA), survivin, Receptor Tyrosine Kinase Like Orphan Receptor 1 (ROR1), tumor-associated glycoprotein 72 (TAG72), Tyrosinase related protein 1 (TRP1, also known as TYRP1 or gp75), Tyrosinase related protein 2 (TRP2, also known as dopachrome tautomerase, dopachrome delta-isomerase or DCT), vascular endothelial growth factor receptor (VEGF receptors or VEGFR), vascular endothelial growth factor receptor 2 (VEGF-R2), Wilms Tumor 1 (WT-1), a pathogen-specific antigen.

[0904] 161. The kit of any of embodiments 156-160, wherein the disease or condition is ALL.

[0905] 162. The kit of any of embodiments 156-162, wherein the immunotherapy is a T cell-engaging therapy comprising a bispecific antibody, wherein at least one binding portion specifically binds to a T cell antigen.

[0906] 163. The kit of embodiment 161 or 162, wherein the at least one binding portion specifically binds to CD3

[0907] 164. The kit of any of embodiments 161-163, wherein a second binding portion of the bispecific antibody binds to an antigen, optionally wherein the antigen is CD19.

[0908] 165. The kit of any of embodiments 156-161, wherein the immunotherapy is a cell therapy.

[0909] 166. The kit of any of embodiments156-161 or 165, wherein the immunotherapy is a T cell therapy comprising genetically engineered cells expressing a recombinant receptor that specifically binds to a ligand.

[0910] 167. The kit of embodiment 166, wherein the recombinant receptor is a T cell receptor or a functional non-T cell receptor.

[0911] 168. The kit of embodiment 167 or 168, wherein the recombinant receptor is a chimeric antigen receptor (CAR).

[0912] 169. The kit of embodiment 168, wherein the CAR comprises an extracellular antigen-recognition domain that specifically binds to the antigen and an intracellular signaling domain comprising an ITAM, wherein optionally, the intracellular signaling domain comprises an intracellular domain of a CD3-zeta (CD3) chain; and/or wherein the CAR further comprises a costimulatory signaling region, which optionally comprises a signaling domain of CD28 or 4-1BB.

[0913] 170. The kit of any of embodiments 109-169, further comprising an agent or other treatment capable of treating, preventing, delaying, reducing or attenuating the development or risk of development of a toxicity.

[0914] 171. The kit of embodiment 170, wherein the agent or other treatment is or comprises one or more of a steroid; an antagonist or inhibitor of a cytokine receptor or cytokine selected from among IL-10, IL-10R, IL-6, IL-6 receptor, IFNy, IFNGR, IL-2, IL-2R/CD25, MCP-1, CCR2, CCR4, MIP1β, CCRS, TNF-alpha, TNFR1, IL-1, and IL-1Ralpha/IL-1beta; or an agent capable of preventing, blocking or reducing microglial cell activity or function.

[0915] 172. The kit of embodiment 171, wherein the antagonist or inhibitor is or comprises an agent selected from among an antibody or antigen-binding fragment, a small molecule, a protein or peptide and a nucleic acid.

[0916] 173. The kit of any of embodiments 170-172, wherein the agent or other treatment is an anti-IL-6 antibody or an anti-IL6 receptor antibody.

[0917] 174. The kit of any of embodiments 170-173, wherein the agent or other treatment is or comprises an agent selected from among tocilizumab, siltuximab, clazakizumab, sarilumab, olokizumab (CDP6038), elsilimomab, ALD518/BMS-945429, sirukumab (CNTO 136), CPSI-2634, ARGX-109, FE301 and FM101.

[0918] 175. The kit of any of embodiments 170-174, wherein the agent or other treatment is or comprises tocilizumab.

[0919] 176. The kit of any of embodiments 170-175, wherein the agent or other treatment is or comprises siltuximab.

[0920] 177. The article of manufacture of embodiment 171, wherein the steroid is or comprises dexamethasone.

[0921] 178. The kit of embodiment 171, wherein the agent capable of preventing, blocking or reducing microglial cell activity or function is selected from an anti-inflammatory agent, an inhibitor of NADPH oxidase (NOX2), a calcium channel blocker, a sodium channel blocker, inhibits GM-CSF, inhibits CSF1R, specifically binds CSF-1, specifically binds IL-34, inhibits the activation of nuclear factor kappa B (NF-KB), activates a CB2 receptor and/or is a CB2 agonist, a phosphodiesterase inhibitor, inhibits microRNA-155 (miR-155) or upregulates microRNA-124 (miR-124).

[0922] 179. The kit 178, wherein the agent capable of preventing, blocking or reducing microglial cell activation or function is a small molecule, peptide, protein, antibody or antigen-binding fragment thereof, an antibody mimetic, an aptamer, or a nucleic acid molecule.

[0923] 180. The kit of embodiment 178 or 179, wherein the agent is selected from minocycline, naloxone, nimodipine, Riluzole, MOR103, lenalidomide, a cannabinoid (optionally WIN55 or 212-2), intravenous immunoglobulin (IVIg), ibudilast, anti-miR-155 locked nucleic acid (LNA), MCS110, PLX-3397, PLX647, PLX108-D1, PLX7486, JNJ-40346527, JNJ28312141, ARRY-382, AC-708, DCC-3014, 5-(3-methoxy-4-((4-methoxybenzyl)oxy)benzyl)pyrimidine-2,4-diamine (GW2580), AZD6495, Ki20227, BLZ945, emactuzumab, IMC-CS4, FPA008, LY-3022855, AMG-820 and TG-3003.

[0924] 181. The kit of any of embodiments 178-180, wherein the agent is an inhibitor of colony stimulating factor 1 receptor (CSF1R).

[0925] 182. The kit of any of embodiments 178-181, wherein the inhibitor is selected from:

[0926] PLX-3397, PLX647, PLX108-D1, PLX7486, JNJ-40346527, JNJ28312141, ARRY-382, AC-708, DCC-3014, 5-(3-methoxy-4-((4-methoxybenzyl)oxy)benzyl)pyrimidine-2,4-diamine (GW2580), AZD6495, Ki20227, BLZ945 or a pharmaceutical salt or prodrug thereof;

[0927] emactuzumab, IMC-CS4, FPA008, LY-3022855, AMG-820 and TG-3003 or is an antigen-binding fragment thereof;

[0928] or a combination of any of the foregoing.

[0929] 183. The kit of any of embodiments 178-181, wherein the inhibitor is PLX-3397.

[0930] 184. An article of manufacture, comprising a kit of any one of embodiments 109-183, and instructions for using the reagents to assay a biological sample from a subject that is a candidate for treatment, optionally with an immunotherapy.

[0931] 185. The article of manufacture of embodiment 184, wherein the instructions specify assessing the presence, absence or level of expression of the two or more gene products or portions thereof in the sample, and comparing the presence, absence, or level of expression of the two or more gene products or portions thereof to gene reference values, wherein the comparison indicates the risk or likely risk of the subject developing neurotoxicity following administration of the immunotherapy when administered to the subject.

[0932] 186. The article of manufacture of embodiment of embodiment 185, wherein the instructions specify each of the one or more gene products is individually compared to a gene reference value for the respective gene product.

[0933] 187. The article of manufacture of any of embodiments 184-186, wherein the instructions specify the sample does not comprise cells genetically engineered with the recombinant receptor and/or is obtained from the subject prior to receiving the immunotherapy.

[0934] 188. The article of manufacture of any of embodiments 184-187, wherein the instructions specify the sample is a tumor sample and/or the sample comprises or is likely to comprise tumor cells.

[0935] 189. The article of manufacture of any of embodiments 184-188, wherein the sample is or comprises a bone marrow sample, blood sample, plasma sample, or serum sample.

[0936] 190. The article of manufacture of any of embodiments 184-189, wherein the sample is or comprises a bone marrow sample, optionally a bone marrow aspirate.

[0937] 191. The article of manufacture of any of embodiments 184-190, wherein the instructions specify the comparison indicates the subject is or is likely at risk of developing neurotoxicity if the at least one gene product from the first group of gene products that negatively correlate to a risk of developing neurotoxicity is at or below a gene reference value and/or the at least one gene product from the second group of gene products that negatively correlate to a risk of developing neurotoxicity is at or above a gene reference value; or the instructions the comparison indicates the subject is not or is likely not at risk of developing neurotoxicity if the at least one gene product of (a) is above a gene reference value and/or the at least one gene product of (b) is below a gene reference value.

[0938] 192. The article of manufacture of 191, wherein the instructions specify if the comparison indicates the subject is or is likely to develop neurotoxicity, selecting the subject for administration of a therapeutic regimen, the therapeutic regimen comprising administering to the subject:

[0939] i. an agent or other treatment capable of treating, preventing, delaying, reducing or attenuating the development or risk of development of a toxicity and (2) the immunotherapy, wherein administration of the agent is to be administered (i) prior to, (ii) within one, two, or three days of, (iii) concurrently with and/or (iv) at first fever following, the initiation of administration of the immunotherapy to the subject;ii. the immunotherapy at a reduced dose or at a dose that is not associated with risk of developing toxicity or severe toxicity, or is not associated with a risk of developing a toxicity or severe toxicity in a majority of subjects, and/or a majority of subjects having a disease or condition that the subject has or is suspected of having, following administration of the immunotherapy; and/or

[0940] iii. the immunotherapy in an in-patient setting and/or with admission to the hospital for one or more days, optionally wherein the immunotherapy is otherwise to be administered to subjects on an outpatient basis or without admission to the hospital for one or more days; or

[0941] iv. an alternative therapeutic treatment other than the immunotherapy. 193. The article of manufacture of 192, wherein the instructions specify if the comparison indicates the subject is not or is likely not at risk of developing neurotoxicity, selecting the subject for administration of a therapeutic regimen, the therapeutic regimen comprising administering to the subject:

[0942] i. the immunotherapy, optionally at a non-reduced dose, optionally on an outpatient basis or without admission to the hospital for one or more days;

[0943] ii. the immunotherapy, wherein administration of the immunotherapy does not comprise administering, prior to or concurrently with administering the immunotherapy and/or prior to the development of a sign or symptom of toxicity other than fever, an agent or treatment capable of treating, preventing, delaying, or attenuating the development of the toxicity; or

[0944] iii. the immunotherapy in an outpatient setting and/or without admission of the subject to the hospital overnight or for one or more consecutive days and/or is without admission of the subject to the hospital for one or more days.

[0945] 194. The article of manufacture of embodiment 192 or 193, wherein the instructions specify the results of assessing the presence, absence or level of expression of the one or more gene products or portions thereof comprises a comparison to a gene reference value, wherein the comparison indicates the risk or likely risk of the subject developing neurotoxicity following administration of the immunotherapy when administered to the subject.

[0946] 195. The article of manufacture of embodiment 194, wherein the instructions specify each of the one or more gene products is individually compared to a gene reference value for the respective gene product.

[0947] 196. The article of manufacture of embodiment 195 or 196, wherein the instructions specify:

[0948] expression of the at least one or more gene products from the first group of gene products negatively correlate to a risk that the subject is or is likely to develop neurotoxicity following administration of the immunotherapy when it is administered; and/or expression of the at least one or more gene products from the second group of gene products positively correlates to a risk that the subject is or is likely to develop neurotoxicity following administration of the immunotherapy when it is administered.

[0949] 197. The article of manufacture of any of embodiments 184-196, wherein the instructions specify if the assessing indicates the subject is or is likely to develop neurotoxicity following administration of the immunotherapy, the therapeutic regimen comprises administering to the subject:

[0950] i. the agent or other treatment capable of treating, preventing, delaying, reducing or attenuating the development or risk of development of a toxicity and (2) the immunotherapy, wherein administration of the agent is to be administered (i) prior to, (ii) within one, two, or three days of, (iii) concurrently with and/or (iv) at first fever following, the initiation of administration of the immunotherapy to the subject;

[0951] ii. the immunotherapy at a reduced dose or at a dose that is not associated with risk of developing toxicity or severe toxicity, or is not associated with a risk of developing a toxicity or severe toxicity in a majority of subjects, and/or a majority of subjects having a disease or condition that the subject has or is suspected of having, following administration of the immunotherapy; and/or

[0952] iii. the immunotherapy in an in-patient setting and/or with admission to the hospital for one or more days, optionally wherein the immunotherapy is otherwise to be administered to subjects on an outpatient basis or without admission to the hospital for one or more days; or

[0953] iv. an alternative therapeutic treatment other than the immunotherapy.

[0954] 198. The article of manufacture of any of embodiments 184-197, wherein the instructions specify if the assessing indicates the subject is not or is likely not to develop neurotoxicity following administration of the immunotherapy, the therapeutic regimen comprises administering to the subject:

[0955] i. the immunotherapy, optionally at a non-reduced dose, optionally on an outpatient basis or without admission to the hospital for one or more days;

[0956] ii. the immunotherapy, wherein administration of the immunotherapy does not comprise administering, prior to or concurrently with administering the immunotherapy and/or prior to the development of a sign or symptom of toxicity other than fever, an agent or treatment capable of treating, preventing, delaying, or attenuating the development of the toxicity; or iii. the immunotherapy in an outpatient setting and/or without admission of the subject to the hospital overnight or for one or more consecutive days and/or is without admission of the subject to the hospital for one or more days.

[0957] 199. The article of manufacture of embodiment 184,wherein the instructions specify:

[0958] selecting a subject that exhibits a Philadelphia chromosome (Ph+) and/or Ph chromosome-like (Ph-like) molecular subtype of acute lymphoblastic leukemia (ALL); and

[0959] administering to the subject a immunotherapy comprising a dose of cells expressing a recombinant receptor that binds to an antigen associated with the ALL.

[0960] 200. The article of manufacture of embodiment 199, wherein the instructions specify the subject exhibits a PH+ and/or a Ph-like molecular subtype of ALL if the comparison indicates the at least one gene product of the first group of gene products is above a gene reference value and/or the at least one gene product of the second group of gene products is below a gene reference value.

[0961] 201. The article of manufacture of any of embodiments 184-200, wherein the instructions specify:

[0962] prior to initiation of administration of the dose of cells, the subject has not been administered an agent or treatment capable of treating, preventing, delaying, reducing or attenuating the development or risk of development of a toxicity; and/or

[0963] the subject is not administered an agent or treatment for the treatment or prevention or reduction or attenuation of a neurotoxicity and/or a cytokine release syndrome or risk thereof, within a period of time following administration of the dose, which period of time is optionally at or about 1, 2, 3, 4, 5 days or is optionally at or about 6, 7, 8, 9, 10, 11 days or is optionally 1 or 2 or 3 or 4 weeks; and/or

[0964] the subject is not administered an agent or treatment for the treatment or prevention or reduction or attenuation of a neurotoxicity and/or a cytokine release syndrome or risk thereof, following administration of the dose, prior to or unless the subject exhibits a sign or symptom of the toxicity and/or prior to or unless the subject exhibits a sign or symptom of the toxicity other than a fever, optionally wherein the fever is not a sustained fever or the fever is or has been reduced or reduced by more than 1° C. after treatment with an antipyretic; and/or

[0965] the administration and any follow-up is carried out on an outpatient basis and/or without admitting the subject to a hospital and/or without an overnight stay at a hospital and/or without requiring admission to or an overnight stay at a hospital, optionally unless or until the subject exhibits a sustained fever or a fever that is or has not been reduced or not reduced by more than 1° C. after treatment with an antipyretic.

[0966] 202. The article of manufacture of any of embodiments 184-201, wherein the instructions specify:

[0967] prior to initiation of administration of the dose of cells, the subject has not been administered an anti-IL-6 or anti-IL-6R antibody, optionally tocilizumab or siltuximab, and/or has not been administered a steroid, optionally dexamethasone

[0968] the subject is not administered an anti-IL-6 or anti-IL-6R antibody, optionally tocilizumab or siltuximab, and/or has not been administered a steroid, optionally dexamethasone, within a period of time following administration of the dose, which period of time is optionally at or about 1, 2, 3, 4, 5 days or is optionally at or about 6, 7, 8, 9, 10, 11 days or is optionally 1 or 2 or 3 or 4 weeks; and/or

[0969] the subject is not administered an anti-IL-6 or anti-IL-6R antibody, optionally tocilizumab or siltuximab, and/or has not been administered a steroid, optionally dexamethasone, following administration of the cell dose, prior to, or unless, the subject exhibits a sign or symptom of a toxicity, optionally a neurotoxicity or CRS, and/or prior to, or unless, the subject exhibits a sign or symptom of a toxicity, optionally a neurotoxicity or CRS, other than a fever, optionally wherein the fever is not a sustained fever or the fever is or has been reduced or reduced by more than 1° C. after treatment with an antipyretic; and/or the administration and any follow-up is carried out on an outpatient basis and/or without admitting the subject to a hospital and/or without an overnight stay at a hospital and/or without requiring admission to or an overnight stay at a hospital, optionally unless or until the subject exhibits a sustained fever or a fever that is or has not been reduced or not reduced by more than 1° C. after treatment with an antipyretic.

[0970] 203. The article of manufacture of any of embodiments 184-202, wherein the instructions specify:

[0971] the administration is carried out on an outpatient basis and/or without requiring admission to or an overnight stay at a hospital; and

[0972] if the subject exhibits a sustained fever or a fever that is or has not been reduced or not reduced by more than 1° C. after treatment with an antipyretic, the subject is admitted to the hospital or to an overnight stay at a hospital and/or is administered an agent or treatment for the treatment or prevention or reduction or attenuation of a neurotoxicity and/or a cytokine release syndrome or risk thereof.

[0973] 204. The article of manufacture of any of embodiments 184-203, wherein the instructions specify neurotoxicity comprises severe neurotoxicity, optionally at or above grade 4 or grade 5 or at least prolonged grade 3 neurotoxicity.

[0974] 205. The article of manufacture of any of embodiments 184-204, wherein the instructions specify the neurotoxicity is associated with cerebral edema.

[0975] 206. The article of manufacture of any of embodiments 184-205, wherein the instructions specify the presence, absence or level of expression of one, two, three, four, five, six, seven, eight, nine, ten or more gene products is assessed or compared.

[0976] 207. The article of manufacture of any of embodiments 184-206, wherein the instructions specify the one or more gene products or portion or fragment thereof is a polynucleotide or a portion thereof, optionally a messenger RNA (mRNA) transcript or a partial transcript thereof.

[0977] 208. The article of manufacture of embodiment 207, wherein the instructions specify cDNA is prepared by PCR amplification of the mRNA transcript or partial transcript thereof.

[0978] 209. The article of manufacture of embodiment 207 or 208, wherein the instructions specify the presence, absence or level of expression of the one or more gene products or portions thereof is assessed by polymerase chain reaction (PCR), northern blotting, microarray, and/or a sequencing technique

[0979] 210. The article of manufacture of any of embodiments 184-206, wherein the instructions specify the one or more gene products or portions thereof comprise a protein or a portion thereof.

[0980] 211. The article of manufacture of embodiment 210, wherein the instructions specify the presence, absence or level of expression of the one or more gene products or portions thereof is measured by an immunoassay, nucleic acid-based or protein-based aptamer techniques, high precision liquid chromatography (HPLC), peptide sequencing, and/or mass spectrometry.

[0981] 212. The article of manufacture of embodiment 211, wherein the instructions specify the presence, absence or level of the one or more gene products or portions thereof is measured by immunoassay and the immunoassay is selected from enzyme-linked immunosorbent assay (ELISA), enzyme immunoassay (EIA), radioimmunoassay (RIA), surface plasmon resonance (SPR), Western Blot, Lateral flow assay, immunohistochemistry, protein array or immuno-PCR iPCR).

[0982] 213. The article of manufacture of any of embodiments 184-212, wherein the instructions specify the gene reference value, or each of the gene reference values individually for each of the at least one or more gene product, is determined by application of an algorithm to the level, concentration or amount of expression in a control sample, or the average of such level, concentration or amount of expression among a plurality of control samples.

[0983] 214. The article of manufacture of any of embodiments 184-213, wherein the instructions specify the gene reference value, or each of the gene reference values individually for each of the at least one or more gene product is a determined value.

[0984] 215. An article of manufacture comprising an immunotherapy and instructions for administering the immunotherapy to a subject that exhibits a Philadelphia chromosome (Ph+) and/or Ph chromosome-like (Ph-like) molecular subtype of acute lymphoblastic leukemia (ALL).

[0985] 216. The article of manufacture of embodiment 215, wherein the instructions specify the subject exhibits the PH+ and/or the Ph-like molecular subtype based on results of cytogenetic or molecular genetic analysis.

[0986] 217. The article of manufacture of embodiment 215 or 216, wherein the immunotherapy is a immunotherapy or is a T cell-engaging therapy, optionally wherein the immunotherapy comprises cells engineered to express a recombinant receptor.

[0987] 218. The article of manufacture of any of embodiments 215-217, wherein the instructions specify the analysis comprises karyotype analysis, fluorescence in situ hybridization (FISH), multicolor FISH, polymerase chain reaction (PCR), a tyrosine kinase inhibitor assay, gene expression profiling or microarray or an immunoassay, optionally an ELISA.

[0988] 219. The article of manufacture of any of embodiments 215-218, wherein the instructions specify:

[0989] the selected subject exhibits one or more of the (9;22)(q34;q11) chromosomal abnormality; deletion or mutation of IKZF1 transcription factor; a kinase-activating alteration, optionally a rearrangement involving ABL1, ABL2, CRLF2, CSF1R, EPOR, JAK2, NTRK3, PDGFRB, PTK2B, TSLP, or TYK2; a sequence mutation involving FLT3, IL7R, SH2B3, TYK2, IL2RB, NTRK3, DGKH, KRAS, NRAS, PTPN11, NF1; and/or comprises a Ph-like gene expression signature;

[0990] the subject is selected based on one or more of the presence of the (9;22)(q34;q11) chromosomal abnormality, deletion or mutation of IKZF1 transcription factor; a kinase-activating alteration, optionally a rearrangement involving ABL1, ABL2, CRLF2, CSF1R, EPOR, JAK2, NTRK3, PDGFRB, PTK2B, TSLP, or TYK2; a sequence mutation involving FLT3, IL7R, SH2B3, TYK2, IL2RB, NTRK3, DGKH, KRAS, NRAS, PTPN11, NF1; and/or the presence of a Ph-like gene expression signature.

[0991] 220. The article of manufacture of any of embodiments 215-219, wherein the instructions specify the presence of the Ph-like gene signature is based on comparison of the presence, absence or level of expression, in a sample from the subject, of at least one gene product to a reference gene value, said at least one gene product is selected from (a) ADGRF1, BMPR1B, CA6, CCL17, CCR6, CD99, CHN2, CRLF2, DENND3, ENAM, GAS6, GBP5, GLI2, IFITM1, IGJ (JCHAIN), LDB3, L0645744, MDF1C, MUC4, NRXN3, PON2, PTP4A3, S100Z, SEMA6A, SLC37A3, SLC2A5, SPATS2L, TMEM154, TP53INP1, TTYH2, IL2RA, or WNT9A or a portion or fragment of any of the foregoing and/or said at least one gene product is selected from (b) ASAP2, FMNL2, GPR176, MDFI, PCDHGA12, PCDHGA6, PCDHGBS, PCDHGB6, PINLYP, PTCH1, ATP9A, HMX3, DPYSL3, ZNF415, IRX5, TMPRSS15, IL3RA, IGF2BP1, or TTC28 or is a portion or fragment of any of the foregoing, whereby the comparison indicates whether the subject exhibits a Ph-like molecular subtype of ALL.

[0992] 221. The article of manufacture of embodiment 220, wherein the instructions specify each of the one or more gene products is individually compared to a gene reference value for the respective gene product.

[0993] 222. The article of manufacture of any of embodiment 220 or embodiment 221, wherein the instructions specify the subject exhibits a Ph-like molecular subtype of ALL if the comparison indicates the at least one gene product of (a) is above a gene reference value and/or the at least one gene product of (b) is below a gene reference value.

[0994] 223. The article of manufacture of any of embodiments 220-222, wherein the instructions specify the at least one gene product selected from (a) is ADGRF1, BMPR1B, CA6, CD99, CHN2, CRLF2, DENND3, ENAM, GBP5, GLI2, IFITM1, IGJ (JCHAIN), LDB3, LO645744, MDF1C, MUC4, NRXN3, PON2, S100Z, SEMA6A, SLC37A3, SLC2A5, SPATS2L, TMEM154, TP53INP1, TTYH2 or WNT9A, or is a portion of fragment of any of the foregoing.

[0995] 224. The article of manufacture of any of embodiments 220-223, wherein the instructions specify the at least one gene product selected from (a) is ADGRF1, CA6, CCL17, CCR6, ENAM, GAS6, GBP5, GLI2, IFITM1, IGJ (JCHAIN), MUC4, PON2, PTP4A3, SEMA6A, SLC37A3, SPATS2L, TMEM154, TP53INP1, IL2RA, or WNT9A or is a portion or fragment of any of the foregoing.

[0996] 225. The article of manufacture of any of embodiments 220-224, wherein the instructions specify the at least one gene product selected from (b) is ASAP2, FMNL2, GPR176, MDFI, PCDHGA12, PCDHGA6, PCDHGBS, PCDHGB6, PINLYP, PTCH1, ATP9A, HMX3, DPYSL3, ZNF415, IRX5, TMPRSS15, IL3RA, IGF2BP1, or TTC28 or is a portion or fragment of any of the foregoing.

[0997] 226. An article of manufacture comprising an immunotherapy, and instructions for administering a therapeutic regimen to a subject that is a candidate for receiving an immunotherapy for treatment of a disease or condition, wherein the instructions specify the administration is carried out following or based on the results of assessing the presence, absence or level of expression, from a sample from the subject, of one or more gene products or portion thereof, wherein:

[0998] (a) at least one of the one or more gene products is selected from ABCA9, ADAMTSL4, ADGRA2, ADGRF1, AK5, APOL1, ARHGAP27, ARID3B, CA6, CABP7, CCDC152, CCL17, CCR1, CCR6, CEP85L, CISH, CR2, CRLF2, ENAM, ENPP2, EPHA4, FTH1P11, FTH1P2, FTH1P8, GADD45A, GAS6, GBP3, GBP5, GBP6, GIMAP1-GIMAPS, GLI2, GPA33, GPRIN3, HSPA1A, IFITM1, IFITM3, IL15, IL2RA, JCHAIN, KIAA1257, LA16c-390H2.4, LAMB1, LDB3, LINC00623, LST1, LTB, LY6E, MAS 1, MUC4, NLRC3, PLXNA4, PON2, PTGES3P1, PTP4A3, RNU1-1, RP11-345J4.6, RP11-421N8.1, RP11-51J9.5, RP11-51O6.1, RP11-552F3.9, RP11-686D22.9, RP11-723D22.3, RP11-723O4.6, RP13-512J5.1, RP4-620F22.2, RP5-940J5.9, RP6-109B7.5, RPL21P75, RYR2, SAMD9L, SEMA6A, SLC37A3, SNRPEP4, SOCS1, SPATS2L, SPON1, SV2C, TMEM154, TP53INP1, TNF, TRIM47, UST, WNT9A, ENG, SELE, ICAM3, or IL6R, or is a portion or fragment thereof; and/or

[0999] (b) at least one of the one or more gene products is selected from ASAP2, ATP9A, CCNA1, CDHR3, CECR2, DLX1, DPYSL3, EHD4, FMNL2, GGA2, HHIPL1, HMX3, IGF2BP1, IL3RA, IRX5, KCNIP1, KIAA1644, LINC00092, LINC01483, MIB1, MMP14, NOM1, OTOA, PCDHGA12, PCDHGA4, PCDHGA6, PCDHGBS, PCDHGB6, PINLYP, PPM1E, PRKD1, PROKR2, PRTG, PTCH1, RFX8, RP11-146B14.1, RP11-3P17.5, RP11-41O4.1, RP11-713N11.4, RP4-568B10.1, SERF1A, SEZ6L, SMURF1, TBC1D30, TCF12, TCP11, TM9SF3, TMPRSS15, TNKS1BP1, TTC28, PCDHGA9, FMNL1, or ZNF415 or is a portion or fragment thereof.

[1000] 227. The article of manufacture of embodiment 226, wherein the immunotherapy is a cell therapy or is a T cell-engaging therapy, optionally wherein the cell therapy comprises cells engineered to express a recombinant receptor.

[1001] 228. The article of manufacture of embodiment 226 or 227, wherein at least one of the one or more gene products is from (a) and at least one of the one or more gene products is from (b).

[1002] 229. The article of manufacture of any of embodiments 226-228, wherein the instructions specify the sample is obtained from the subject prior to receiving the immunotherapy and/or the sample does not comprise cells expressing a recombinant receptor.

[1003] 230. The article of manufacture of any of embodiments 226-229, wherein the instructions specify the presence, absence or level of the one or more gene products is associated with a risk of developing neurotoxicity following administration of the immunotherapy.

[1004] 231. The article of manufacture of any of embodiments 226-230, wherein the instructions specify the results of assessing the presence, absence or level of expression of the one or more gene products or portions thereof comprises a comparison to a gene reference value, wherein the comparison indicates the risk or likely risk of the subject developing neurotoxicity following administration of the immunotherapy when administered to the subject.

[1005] 232. The article of manufacture of embodiment 231, wherein the instructions specify each of the one or more gene products is individually compared to a gene reference value for the respective gene product.

[1006] 233. The article of manufacture of any of embodiments 226-232, wherein the instructions specify:

[1007] expression of the at least one or more gene products from (a) negatively correlate to a risk that the subject is or is likely to develop neurotoxicity following administration of the immunotherapy when it is administered; and/or

[1008] expression of the at least one or more gene products from (b) positively correlates to a risk that the subject is or is likely to develop neurotoxicity following administration of the immunotherapy when it is administered.

[1009] 234. The article of manufacture of any of embodiments 226-233, wherein the instructions specify if the assessing indicates the subject is or is likely to develop neurotoxicity following administration of the immunotherapy, the therapeutic regimen comprises administering to the subject:

[1010] i. an agent or other treatment capable of treating, preventing, delaying, reducing or attenuating the development or risk of development of a toxicity and (2) the immunotherapy, wherein administration of the agent is to be administered (i) prior to, (ii) within one, two, or three days of, (iii) concurrently with and/or (iv) at first fever following, the initiation of administration of the immunotherapy to the subject;

[1011] ii. the immunotherapy at a reduced dose or at a dose that is not associated with risk of developing toxicity or severe toxicity, or is not associated with a risk of developing a toxicity or severe toxicity in a majority of subjects, and/or a majority of subjects having a disease or condition that the subject has or is suspected of having, following administration of the immunotherapy; and/or

[1012] iii. the immunotherapy in an in-patient setting and/or with admission to the hospital for one or more days, optionally wherein the immunotherapy is otherwise to be administered to subjects on an outpatient basis or without admission to the hospital for one or more days; or

[1013] iv. an alternative therapeutic treatment other than the immunotherapy.

[1014] 235. The article of manufacture of any of embodiments 226-234, wherein the instructions specify if the assessing indicates the subject is not or is likely not to develop neurotoxicity following administration of the immunotherapy, the therapeutic regimen comprises administering to the subject:

[1015] i. the immunotherapy, optionally at a non-reduced dose, optionally on an outpatient basis or without admission to the hospital for one or more days;

[1016] ii. the immunotherapy, wherein administration of the immunotherapy does not comprise administering, prior to or concurrently with administering the immunotherapy and/or prior to the development of a sign or symptom of toxicity other than fever, an agent or treatment capable of treating, preventing, delaying, or attenuating the development of the toxicity; or

[1017] iii. the immunotherapy in an outpatient setting and/or without admission of the subject to the hospital overnight or for one or more consecutive days and/or is without admission of the subject to the hospital for one or more days.

[1018] 236. The article of manufacture of any of embodiments 215-235, wherein the disease or condition is a cancer, optionally a myeloma, lymphoma or leukemia.

[1019] 237. The article of manufacture of any of embodiments 215-236, wherein the disease or condition is a B cell malignancy.

[1020] 238. The article of manufacture of embodiment 237, wherein the B cell malignancy is selected from acute lymphoblastic leukemia (ALL), chronic lymphoblastic leukemia (CLL), acute myelogenous leukemia (AML), chronic myelogenous leukemia (CML), non-Hodgkin lymphoma (NHL), or Diffuse Large B-Cell Lymphoma (DLBCL), or a subtype of any of the foregoing.

[1021] 239. The article of manufacture of any of embodiments 215-238, wherein the disease or condition is acute lymphoblastic leukemia (ALL) or a subtype thereof

[1022] 240. The article of manufacture of any of embodiments 215-239, wherein the at least one gene product is from (a) and is a gene product associated with a PH+ or Ph-like molecular subtype of ALL.

[1023] 241. The article of manufacture of embodiment 240, wherein the at least one gene product is selected from ADGRF1, BMPR1B, CA6, CCL17, CCR6, CD99, CHN2, CRLF2, DENND3, ENAM, GAS6, GBP5, GLI2, IFITM1, IGJ (JCHAIN), LDB3, L0645744, MDF1C, MUC4, NRXN3, PON2, PTP4A3, S100Z, SEMA6A, SLC37A3, SLC2A5, SPATS2L, TMEM154, TP53INP1, TTYH2, IL2RA, or WNT9A, or is a portion or fragment of any of the foregoing.

[1024] 242. The method of embodiment 215-241, wherein the immunotherapy is a T cell-engaging therapy comprising a bispecific antibody, wherein at least one binding portion specifically binds to a T cell antigen.

[1025] 243. The method of embodiment 242, wherein the at least one binding portion specifically binds to CD3.

[1026] 244. The method of embodiment 242 or 243, wherein a second binding portion of the bispecific antibody binds to an antigen, optionally wherein the antigen is CD19.

[1027] 245. The method of any of embodiments 215-241, wherein the immunotherapy is a cell therapy.

[1028] 246. The method of any of embodiments 215-241 or 245, wherein the immunotherapy is a T cell therapy comprising genetically engineered cells expressing a recombinant receptor that specifically binds to a ligand.

[1029] 247. The article of manufacture of any of embodiments 215-248, wherein the subject is a human and/or the one or more gene products is human.

### VIII. EXAMPLES

[1030] The following examples are included for illustrative purposes only and are not intended to limit the scope of the invention.

### Example 1

### Observed Correlation Between Gene Expression in Tumor From Bone Marrow Aspirate and Development of Neurotoxicity in Subjects After Administration of CAR+ T Cell Therapy

[1031] Bone marrow aspirates (BMA), obtained from subjects prior to administration of a T cell composition containing T cells genetically engineered with a chimeric antigen receptor, were collected and analyzed by RNA sequencing (RNA-Seq) to assess expression of genes that correlated to the development of neurotoxicity in subjects administered a CAR+ T cell composition.

[1032] The BMA samples assessed were from subjects (N=31) having relapsed or refractory Acute Lymphoblastic Leukemia (ALL) that were subsequently administered a cell therapy involving a T cell composition containing autologous T cells engineered to express an anti-CD19 chimeric antigen receptor (CAR). The CAR+ T cell composition had been generated by a process including immunoaffinity-based selection of T cells (including CD4+ and CD8+ cells) from leukapheresis samples from the individual subjects, followed by activation and transduction with a viral vector encoding the anti-CD19 CAR, expansion and cryopreservation. The CAR contained an anti-CD19 scFv that was derived from the murine antibody SJ25C1; a region of CD28 including an extracellular region, a transmembrane domain and a costimulatory region; and a CD3-zeta intracellular signaling domain. The cryopreserved cell compositions were thawed at bedside prior to intravenous administration.

[1033] The CAR+ T cell composition was administered to subjects at a first target dose of approximately 1×10⁶ CD3+CAR+cells/kg (subject body weight). Some subjects received a second dose, at approximately between 14 and 28 days following the initial dose. Before administration of autologous CAR-expressing cells, subjects had been administered a preconditioning lymphodepleting chemotherapy containing either a single dose of cyclophosphamide (cy; about 1-3 g/m²) only or cyclophosphamide (30-60 mg/kg) and fludarabine (flu/cy; 25 mg/m²-30 mg/m², administered daily over three days).

[1034] After administration of the T cell composition, subjects were monitored for clinical response and adverse outcomes such as neurotoxicity, e.g., severe neurotoxicity. Subjects were assessed and monitored for neurotoxicity (neurological complications including symptoms of confusion, aphasia, encephalopathy, myoclonus seizures, convulsions, lethargy, and/or altered mental status), graded on a 0-5 scale, according to the National Cancer Institute—Common Toxicity Criteria (CTCAE) scale, version 4.03 (NCI-CTCAE v4.03). Common Toxicity Criteria (CTCAE) scale, version 4.03 (NCI-CTCAE v4.03). See Common Terminology for Adverse Events (CTCAE) Version 4, U.S. Department of Health and Human Services, Published: May 28, 2009 (v4.03: June 14, 2010); and Guido Cavaletti & Paola Marmiroli Nature Reviews Neurology 6, 657-666 (December 2010). The number of individual BMA samples associated with the highest grade of neurotoxicity experienced by the subject following administration of the CAR T cell therapy is shown in Table E1.

TABLE E1
Number of BMA samples associated with each neurotoxicity grade

Neurotoxicity Grade

| | Total | 0 | 1 | 2 | 3 | 4 | 5 |
|---|---|---|---|---|---|---|---|
| Samples | 31 | 6 | 4 | 3 | 11 | 2 | 5 |

[1035] Transcriptome analysis was carried out by RNA-Seq, FPKM and FPKQ values were determined; FPKQ values were log-transformed (log 2).

[1036] Expression of approximately 30,000 genes by RNA-Seq from BMA samples were correlated, post facto, to the development of neurotoxicity in subjects following administration of the autologous therapeutic CAR-T cell composition. Genes were identified that were significantly expressed in BMA samples from either conditions in which (1) subjects went on to develop grade of 4 or 5 neurotoxicity after receiving the cell therapy (n=7); or (2) subjects that developed grades of 0 and 1 neurotoxicity after receiving the cell therapy (n=10). Gene products were identified that were different among the two groups based on analysis of a volcano plot depicting statistical significance of expression of the gene products with the 1og 2 fold-change of expression of each gene product between the two conditions (FIG. 1A). Genes with greater than a 1og 2 fold change in gene expression of 1.0 or less than a negative 1og 2 fold change of −1.0 and having a −log 10 adjusted p value of less than 0.1 between samples associated with neurotoxicity grades 0-1 and grades 4-5 were identified as differentially expressed (DE). Among the transcripts, 119 DE genes were identified.

[1037] Table E2A sets forth DE genes that were expressed at higher levels in samples associated with development of grade 0 or 1 neurotoxicity compared to grade 4 or 5 neurotoxicity after administration of the T cell composition to subjects (designated “A” genes) and Table E2B sets forth genes that were expressed at higher levels in samples associated with development of grade 4 or 5 neurotoxicity compared to grade 0 or 1 neurotoxicity after administration of the T cell composition to subjects (designated “B” genes).

TABLE E2A
“A” genes and transcripts with elevated expression
in BMA Samples associated with grade 0-1 neurotoxicity

| Gene Symbol | Full name | Uniprot No. |
|---|---|---|
| ABCA9 | ATP-binding cassette sub-family A member 9 | Q8IUA7 |
| ADAMTSL4 | ADAMTS-like protein 4 | Q6UY14 |
| ADGRA2 | Adhesion G protein-coupled receptor A2 | Q96PE1 |
| ADGRF1 | adhesion G protein-coupled receptor F1 | Q5T601 |
| AK5 | Adenylate kinase isoenzyme 5 | Q9Y6K8 |
| APOL1 | Apolipoprotein L1 | O14791 |
| ARHGAP27 | Rho GTPase-activating protein 27 | Q6ZUM4 |
| ARID3B | AT-rich interactive domain-containing protein 3B | Q8IVW6 |
| CA6 | carbonic anhydrase 6 | P23280 |
| CABP7 | Calcium-binding protein 7 | Q86V35 |
| CCDC152 | Coiled-coil domain-containing protein 152 | Q4G0S7 |
| CCL17 | C-C motif chemokine ligand 17 | Q92583 |
| CCR1 | C-C chemokine receptor type 1 | P32246 |
| CCR6 | C-C motif chemokine receptor 6 | P51684 |
| CEP85L | Centrosomal protein of 85 kDa-like | Q5SZL2 |
| CISH | Cytokine-inducible SH2-containing protein | Q9NSE2 |
| CR2 | Complement receptor type 2 | P20023 |
| CRLF2 | Cytokine receptor-like factor 2 | Q9HC73 |
| ENAM | enamelin | Q9NRM1 |
| EPHA4 | Ephrin type-A receptor 4 | P54764 |
| FTH1P11 | ferritin heavy chain 1 pseudogene 11 | — |
| FTH1P2 | ferritin heavy chain 1 pseudogene 2 | — |
| FTH1P8 | ferritin heavy chain 1 pseudogene 8 | — |
| ENPP2 | Ectonucleotide pyrophosphatase/phosphodiesterase | Q13822 |
| | family member 2 | |
| GADD45A | Growth arrest and DNA damage-inducible protein | P24522 |
| | GADD45 alpha | |
| GAS6 | growth arrest specific 6 | Q14393 |
| GBP3 | Guanylate-binding protein 3 | Q9H0R5 |
| GBP5 | Guanylate binding protein 5 | Q96PP8 |
| GBP6 | Guanylate-binding protein 6 | Q6ZN66 |
| GIMAP1- | GIMAP1-GIMAP5 readthrough | A0A087WTJ2 |
| GIMAP5 | | |
| GLI2 | GLI family zinc finger 2 | P10070 |
| GPA33 | Cell surface A33 antigen | Q99795 |
| GPRIN3 | G protein-regulated inducer of neurite outgrowth 3 | Q6ZVF9 |
| HSPA1A | Heat shock 70 kDa protein 1A | P0DMV8 |
| IFITM1 | interferon induced transmembrane protein 1 | P13164 |
| IFITM3 | Interferon-induced transmembrane protein 3 | Q01628 |
| IL15 | Interleukin-15 | P40933 |
| IL2RA | Interleukin-2 receptor subunit alpha | P01589 |
| JCHAIN | joining chain of multimeric IgA and IgM | P01591 |
| KIAA1257 | Uncharacterized protein KIAA1257 | Q9ULG3 |
| LA16c-390H2.4 | LOC101929732 | |
| LAMB1 | Laminin subunit beta-1 | P07942 |
| LDB3 | LIM domain-binding protein 3 | O75112 |
| LINC00623 | long intergenic non-protein coding RNA 623 | |
| LST1 | Leukocyte-specific transcript 1 protein | O00453 |
| LTB | Lymphotoxin-beta | Q06643 |
| LY6E | Lymphocyte antigen 6E | Q16553 |
| MAS1 | Proto-oncogene Mas | P04201 |
| MUC4 | Mucin 4 | Q99102 |
| NLRC3 | NLR family CARD domain-containing protein 3 | Q7RTR2 |
| PLXNA4 | Plexin-A4 | Q9HCM2 |
| PON2 | paraoxonase 2 | Q15165 |
| PTGES3P1 | prostaglandin E synthase 3 pseudogene 1 | |
| PTP4A3 | protein tyrosine phosphatase type IVA, member 3 | O75365 |
| RNU1-1 | RNA, U1 small nuclear 1 | |
| RP11-345J4.6 | | |
| RP11-421N8.1 | | |
| RP11-51J9.5 | | |
| RP11-51O6.1 | | |
| RP11-552F3.9 | | |
| RP11-686D22.9 | | |
| RP11-723D22.3 | | |
| RP11-723O4.6 | | |
| RP13-512J5.1 | | |
| RP4-620F22.2 | | |
| RP5-940J5.9 | | |
| RP6-109B7.5 | | |
| RPL21P75 | | |
| RYR2 | Ryanodine receptor 2 | Q92736 |
| SAMD9L | Sterile alpha motif domain-containing protein 9-like | Q8IVG5 |
| SEMA6A | semaphorin 6A | Q9H2E6 |
| SLC37A3 | solute carrier family 37 member 3 | Q8NCC5 |
| SNRPEP4 | small nuclear ribonucleoprotein polypeptide E | |
| | pseudogene 4 | |
| SOCS1 | Suppressor of cytokine signaling 1 | O15524 |
| SPATS2L | SPATS2-like protein | Q9NUQ6 |
| SPON1 | Spondin-1 | Q9HCB6 |
| SV2C | Synaptic vesicle glycoprotein 2C | Q496J9 |
| TMEM154 | transmembrane protein 154 | Q6P9G4 |
| TNF | Tumor necrosis factor | P01375 |
| TP53INP1 | Tumor protein p53-inducible nuclear protein 1 | Q96A56 |
| TRIM47 | Tripartite motif-containing protein 47 | Q96ED4 |
| UST | Uronyl 2-sulfotransferase | Q9Y2C2 |

TABLE E2B
“B” genes and transcripts with elevated expression in
BMA Samples associated with grade 4 or 5 neurotoxicity

| Gene symbol | Full name | Uniprot No. |
|---|---|---|
| ASAP2 | ArfGAP with SH3 domain, ankyrin repeat and PH | O43150 |
| | domain 2 | |
| ATP8B1 | Phospholipid-transporting ATPase IC | O43520 |
| ATP9A | ATPase phospholipid transporting 9A | Q2NLD0 |
| CCNA1 | Cyclin-A1 | P78396 |
| CDHR3 | Cadherin-related family member 3 | Q6ZTQ4 |
| CECR2 | Cat eye syndrome critical region protein 2 | Q9BXF3 |
| CELF4 | CUGBP Elav-like family member 4 | Q9BZC1 |
| DLX1 | Homeobox protein DLX-1 | P56177 |
| DPYSL3 | dihydropyrimidinase like 3 | Q14195 |
| EHD4 | EH domain-containing protein 4 | Q9H223 |
| FMNL2 | formin like 2 | Q96PY5 |
| GGA2 | ADP-ribosylation factor-binding protein GGA2 | Q9UJY4 |
| GPR176 | G protein-coupled receptor 176 | Q14439 |
| HHIPL1 | HHIP-like protein 1 | Q96JK4 |
| HMX3 | Homeobox protein HMX3 | A6NHT5 |
| IGF2BP1 | insulin like growth factor 2 mRNA binding protein 1 | Q9NZI8 |
| HOXA7 | Homeobox protein Hox-A7 | P31268 |
| IL3RA | interleukin 3 receptor subunit alpha | P26951 |
| IRX3 | Iroquois-class homeodomain protein IRX-3 | P78415 |
| IRX5 | iroquois homeobox 5 | P78411 |
| KCNIP1 | Kv channel-interacting protein 1 | Q9NZI2 |
| KIAA1644 | Uncharacterized protein KIAA1644 | Q3SXP7 |
| LINC00092 | long intergenic non-protein coding RNA 92 | |
| LINC01483 | long intergenic non-protein coding RNA 1483 | |
| MDFI | MyoD family inhibitor | Q99750 |
| MIB1 | E3 ubiquitin-protein ligase MIB1 | Q86YT6 |
| MMP14 | Matrix metalloproteinase-14 | P50281 |
| NOM1 | Nucleolar MIF4G domain-containing protein 1 | Q5C9Z4 |
| OTOA | Otoancorin | Q7RTW8 |
| PCDHGA12 | protocadherin gamma subfamily A, 12 | O60330 |
| PCDHGA4 | Protocadherin gamma-A4 | Q9Y5G9 |
| PCDHGA6 | protocadherin gamma subfamily A, 6 | Q9Y5G7 |
| PCDHGB1 | Protocadherin gamma-B1 | Q9Y5G3 |
| PCDHGB5 | protocadherin gamma subfamily B, 5 | Q9NZI8 |
| PCDHGB6 | protocadherin gamma subfamily B, 6 | Q9Y5G7 |
| PINLYP | phospholipase A2 inhibitor and LY6/PLAUR domain | A6NC86 |
| | containing | |
| PPM1E | Protein phosphatase 1E | Q8WY54 |
| PRKD1 | Serine/threonine-protein kinase D1 | Q15139 |
| PROKR2 | Prokineticin receptor 2 | Q8NFJ6 |
| PRSS12 | Neurotrypsin | P56730 |
| PRTG | Protogenin | Q2VWP7 |
| PTCH1 | Protein patched homolog 1 | Q13635 |
| RFX8 | DNA-binding protein RFX8 | Q6ZV50 |
| RP11-146B14.1 | | |
| RP11-3P17.5 | | |
| RP11-41O4.1 | | |
| RP11-713N11.4 | | |
| RP4-568B10.1 | | |
| SERF1A | Small EDRK-rich factor 1 | O75920 |
| SEZ6L | Seizure 6-like protein | Q9BYH1 |
| SMURF1 | E3 ubiquitin-protein ligase SMURF1 | Q9HCE7 |
| TBC1D30 | TBC1 domain family member 30 | Q9Y2I9 |
| TCF12 | Transcription factor 12 | Q99081 |
| TCP11 | T-complex protein 11 homolog | Q8WWU5 |
| TM9SF3 | Transmembrane 9 superfamily member 3 | Q9HD45 |
| TMPRSS15 | transmembrane protease, serine 15 | P98073 |
| TMSB15A | Thymosin beta-15A | P0CG34 |
| TNKS1BP1 | 182 kDa tankyrase-1-binding protein | Q9C0C2 |
| TREM2 | Triggering receptor expressed on myeloid cells 2 | Q9NZC2 |
| TTC28 | tetratricopeptide repeat domain 28 | Q96AY4 |
| ZNF415 | zinc finger protein 415 | Q09FC8 |

[1038] Hierarchical clustering and heat map analysis of the differentially expressed “A” and “B” genes shown in Tables E2A and E2B were carried out and associated with the identified molecular ALL subtypes of the BMA samples. The analysis indicated that a subset of both the “A” and “B” genes were differentially highly expressed in various molecular subtypes of ALL. It was observed that the list of “A” genes overlapped with components of a genetic signature associated with a high-risk subtype of pediatric ALL, and that a subset of “B” genes were expressed at higher levels in other known molecular ALL subtypes. This gene expression profile may be referred to as Philadelphia like (also referred to as Ph-like or BCR-ABL-like), based on its association in subjects with the Philadelphia chromosome (Ph+), an abnormal chromosome 22 that incorporates of a portion of chromosome 9 (Harvey et al. (2010) Blood, 116:4874-4884; Harvey et al. (2013) Blood, 122:826; International PCT Publ. No. WO2013090419). Analysis the subjects of the clinical study described in above classified 16 patients as having PH+ or Ph-like gene expression and 15 patients having non Ph-like expression.

[1039] Table E3 summarizes the clinical factors of Ph+/Ph-like and non-Ph-like among treated subjects. A significant association was observed between subtype and whether the subject had prior CNS disease or had been treated with both cyclophosphamide (30-60 mg/kg) and fludarabine (flu/cy). No association between subtype and clinical factors previously identified as being correlated with neurotoxicity, (number of prior treatments, tumor burden, and age) were observed.

TABLE E3
Clinical factors associated with molecular subtype

| | | Non | Ph+/ | |
|---|---|---|---|---|
| | Total | Ph-like | Ph-like | p-value |
| Prior CNS disease | 31 | 0 yes | 6 yes | 0.018 |
| Conditioning Cy vs | 31 | 6 Flu/Cy | 1 Flu/Cy | 0.037 |
| Flu/Cy | | | | |
| Prior Blintumamab | 31 | 5 Yes | 10 Yes | 0.160 |
| Sex | 31 | 2 F | 6 F | 0.220 |
| Prior treatments < 2 | 31 | 11 Yes | 6 Yes | 0.458 |
| Tumor Burden | 31 | 53% (Mean) | 47% (Mean) | 0.635 |
| Age | 31 | 39 (Mean) | 42 (Mean) | 0.722 |
| Weight | 31 | 89 kg (Mean) | 90 kg (Mean) | 0.929 |

[1040] Exemplary subsets of the “A” and “B” genes that associated with molecular ALL subtypes are shown in Table E4.

TABLE E4
Subsets of “A” and “B” genes associated
with molecular subtypes of ALL.

| Subset A Genes | Subset of B Genes |
|---|---|
| (Ph-like subtype) | (other molecular subtypes) |
| ADGRF1 (GPR110) | ASAP2 |
| CA6 | FMNL2 |
| CCL17 | GPR176 |
| CCR6 | MDFI |
| CRLF2 | PCDHGA12 |
| ENAM | PCDHGA6 |
| GAS6 | PCDHGB5 |
| GBP5 | PCDHGB6 |
| GLI2 | PINLYP |
| IFITM1 | PTCH1 |
| IGJ (JCHAIN) | TTC28 |
| MUC4 | ATP9A |
| PON2 | HMX3 |
| PTP4A3 | DPYSL3 |
| SEMA6A | ZNF415 |
| SEC37A3 | IRX5 |
| SPATS2L | TMPRSS15 |
| TMEM154 | IL3RA |
| TP53INP1 | IGF2BP1 |
| WNT9A | |
| IL2RA | |

[1041] A hierarchical clustering and heat map analysis of the “A” and “B” genes identified in Table E4 is shown in FIG. 1B in which expression of each gene is grouped by the association to the degree of neurotoxicity observed in the subjects after administration of the CAR+ T cell composition. FIG. 1C sets forth results from a subset of the genes in FIG. 1B but also including PINLYP. Specifically, genes signatures of the BMA samples clustered into three groups. A first group of BMA samples contained a gene signature in which, among subjects that were subsequently administered the CAR+ T cell composition, the exemplary “A” genes were expressed at high levels and “B” genes expressed at lower levels in BMA samples from subjects that went on to develop low neurotoxicity (median grade 1). A second group of BMA samples, which were from subjects that went on to develop a higher degree neurotoxicity (median grade of 4, with the most common grade being a maximum grade of 5) to the administered therapeutic T cell composition, contained a gene signature in which the “A” genes were generally expressed at lower levels and the “B” genes were generally expressed at high levels. A further group of BMA samples generally involved a mixed expression of “A” genes and “B” genes, which was found in BMA samples from subjects that went on to develop moderate neurotoxicity (median grade 3, with the most common grade being 3 and maximum grade of 5) to the administered therapeutic T cell composition. FIG. 1D displays gene expression data of exemplary “A” genes and “B” genes measured in BMA samples from 17 subjects who experienced grade 0-1 or 4-5 neurotoxicity following administration of the CAR+ T cell composition. In agreement with the hierarchical clustering results described above, samples associated with grades 0-1 neurotoxicity displayed high expression of “A” genes and low expression of “B” genes, while samples associated with grades 4-5 neurotoxicity displayed high expression of “B” genes and low expression of “A” genes.

### Example 2

### Multi-Dimensional Analysis of Gene Expression and CAR-Induced Activity of T Cell Therapy With Association to Development of Neurotoxicity

[1042] Gene expression for exemplary “A” genes and exemplary “B” genes were plotted in two dimensions based on RNA expression results described in Example 1. The RNA-seq gene expression values were further plotted as a function of the CAR-antigen-dependent pro-inflammatory cytokine production of the therapeutic T cell composition. Therapeutic compositions that had been administered to individual subjects were separately assessed for information regarding parameters; for example, cells of the therapeutic compositions were incubated in the presence of CD19-expressing target cells and accumulated amounts (pg/mL) of TNF-alpha were assessed.

[1043] FIG. 2A plots FPKQ values (log 2 scale) for expression of CCL17 (A gene) and PINLYP (B gene). FIG. 2B plots FPKQ values (log 2 scale) for expression of CCL17 (A gene) and PCDHGA12 (B gene). In both plots, the size of each plotted data point represents the relative amount of TNF-alpha release TNF-alpha accumulation in culture following culture of cells of the therapeutic composition with cells expressing the antigen for which the CAR was specific, with the largest sized points indicating the highest levels of CAR antigen-specific accumulation of TNF-alpha observed in this assay. Degree of neurotoxicity or absence thereof (grade 0-5) observed in the individual subjects following administration of the CAR+ therapeutic T cell composition is shown next to the each data point. In FIG. 3, RNA-seq-based gene expression level (FPKQ) of an A gene (in this case CCL17) is plotted against the CAR antigen-specific TNF accumulation value (Antigen-stimulated TNF-alpha accumulation), with the size of each plotted data point representing the RNA-seq-based expression of PINLYP (a B gene).

[1044] Results from post-facto analysis of subjects administered the anti-CD19 CAR+ T cell composition indicated that for all assessed BMA samples from subjects who had gone on to develop either grade 4 or grade 5 neurotoxicity following administration of the therapeutic T cell composition, the FPKQ determined for the A gene CCL17 was below a certain level (−1 on the log 2 scale) , the determined FPKQ for the B gene PINLYP was above a certain level (e.g., above 0 or above 0.5 on the log 2 scale shown), and the determined FPKQ for the B gene PCDHGA12 was above a certain level (−2 on the log scale). In general, therapeutic compositions administered to subjects that went on to develop grade 4 or grade 5 neurotoxicity also were observed to have relatively higher levels of the parameter indicative of CAR antigen-specific accumulation of TNF-alpha; no subject with a composition observed with a value for this parameter below a threshold level went on to develop grade 4 or grade 5 neurotoxicity. As shown in FIG. 3, all subjects for which BMA samples were observed to be above the noted level for CCL17 gene FPKQ values did not develop grade 4 or grade 5 neurotoxicity, even those for which administered therapeutic compositions exhibited levels of the threshold value indicative of CAR antigen-specific accumulation of TNF-alpha.

[1045] In some embodiments, expression levels for particular genes or panels of genes, and/or gene expression profiles are determined, for biological samples such as BMA samples (such as those containing tumor cells). In some embodiments, such levels and/or profiles are used to assess the presence, absence and/or level of risk that a patient or patients may go on to experience an adverse event such as neurotoxicity or grade thereof, such as grade 4 or 5, following administration of an immunotherapy such as an engineered cell therapy. In some embodiments, such information or expression levels or profiles, in combination with levels of one or more parameters of therapeutic compositions, such as those indicative of CAR-induced/dependent and/or antigen-specific function, may be used to assess such presence/absence or level of risk. In some embodiments, the combination of such attributes may provide a more accurate predictive value for such risk or outcome.

### Example 3

### Analysis of Gene Signature in Acute Lymphoblastic Leukemia (ALL) Samples

[1046] Analysis of gene expression for genes identified in Example 1 was assessed on RNA-seq data from 250 tumor samples from subjects having childhood precursor B-cell ALL (B-ALL) (see TARGET initiative managed by the National Cancer Institute (NCI); RNA-seq data set and clinical information for the TARGET ALL project used for this analysis are available at the database of Genotypes and Phenotypes (dbGaP) under accession phs000218.v16.p6). FIG. 4 shows hierarchical clustering and heat map of gene expression data from the TARGET dataset for exemplary genes described in Example 1 that were found to be associated with risk of developing grade 4 or 5 neurotoxicity. As shown, approximately 25% of the assessed data set exhibited a gene signature generally exhibiting high expression of “A” genes and low expression of “B” genes, which is the same signature observed in subjects identified in Example 1 that were less likely to develop grade 4 or 5 neurotoxicity after receiving the therapeutic T cell composition.

[1047] Statistical analyses were carried out to assess the degree of correlation of gene expression of various genes with expression of CCL17, an exemplary “A” gene. As shown in Table ES, other “A” list genes were among the genes that were most highly correlated to expression of CCL17. These results demonstrated that the gene signature identified in Example 1 as having high expression of “A” genes and low expression of “B” genes could be identified in another data set.

TABLE E5
Gene Expression Correlated to CCL17
Expression in Pediatric ALL Samples

| Gene Symbol | Correlation (R²) | Category |
|---|---|---|
| CA6 | 0.772 | A |
| ADGRF1 | 0.7133 | A |
| IGJ (JCHAIN) | 0.6612 | A |
| MUC4 | 0.6610 | A |
| WNT9A | 0.6270 | A |
| ADARB2-AS1 | 0.6177 | — |
| SLFN12L | 0.6061 | — |
| TMEM154 | 0.5723 | A |
| SPATS2L | 0.5512 | A |
| ABCA9 | 0.5723 | A |
| SLC37A3 | 0.5457 | A |
| PTP4A3 | 0.5435 | A |
| A2MP1 | 0.5381 | — |
| AK311257 | 0.5340 | — |
| GAS6 | 0.5318 | A |
| NRXN3 | 0.5316 | — |
| RASSF8 | 0.5309 | — |
| LAIR1 | 0.5284 | — |
| CKMT2 | 0.5283 | — |
| ENAM | 0.5163 | A |
| VWA2 | 0.5099 | — |
| STAG3 | 0.5097 | — |
| SOCS2-AS1 | 0.5095 | — |
| MYO1B | 0.5058 | — |
| CD99 | 0.5047 | — |
| GDPD4 | 0.5041 | — |
| TP53INP1 | 0.5038 | A |
| RNF157 | 0.4999 | — |
| GLI2 | 0.4966 | A |
| ECEL1 | 0.4949 | — |
| SLC8A1-AS1 | 0.4941 | — |
| LDB3 | 0.4935 | — |
| CABP7 | 0.4929 | A |
| PRX | 0.4935 | — |
| SOCS2 | 0.4929 | — |
| TMEM236 | 0.4860 | — |
| RASSF8-AS1 | 0.4853 | — |
| PTGDR | 0.4847 | — |
| RPS6KA2 | 0.4814 | — |
| HHIP | 0.4787 | — |
| BMPR1B | 0.4778 | — |
| HDAC7 | 0.4756 | — |
| SEMA6A | 0.4742 | A |

[1048] A clustering analysis of “A” genes was assessed in samples from the TARGET database and from a second dataset, which included microarray data from samples from subjects having B-ALL (GSE79533; described in Hirabayashi et al. Haematologica (2017) 102(1):118-129. PMID: 27634205, see also www.ncbi.nlm.nih.gov/geo/query/acc.cgi?acc=GSE79533). The results indicated that in both the TARGET and GSE79533 data sets, the “A” genes clustered the samples by molecular subtype, with “A” genes highly expressed in PH+ and Ph-like samples.

[1049] The identity of the molecular subtype of ALL was available from clinical information for 12 of the subjects in the clinical trial described in Example 1. Gene fusion analysis from the RNA-seq data collected as described in Example 1 identified fusions corresponding to molecular subtypes in an additional 6 subjects. A machine learning algorithm trained on the TARGET data set was used to classify the samples with a known subtype as Ph-like or non Ph-like based on gene expression. The gene expression prediction was concordant with the known subtype in 94% of the samples.

### Example 4

### Correlation of Acute Lymphoblastic Leukemia (ALL) Molecular Subtype

[1050] With Development of Neurotoxicity Following CAR+ T cell therapy

[1051] The severity of neurotoxicity following administration of a CAR+ T composition to subjects with a Philadelphia chromosome (Ph+) molecular subtype of ALL versus Philadelphia chromosome (Ph−) molecular subtype ALL was assessed from among subjects administered CAR-expressing T cells in three different clinical trials, including the clinical trial described in Example 1(Trial #1). All clinical trials included treatment of subjects with B-ALL with a T cell composition containing autologous T cells engineered to express an anti-CD19 CAR.

[1052] In one of the further clinical trials designated Trial #2, the cells expressed the same anti-CD19 chimeric antigen receptor as employed in the clinical trial described in Example 1, but were manufactured by a different process. In subjects in Trial #2, two days after lymphodepletion, a split dose infusion of CAR-T cells at one of three dose levels: 3×10⁶, 1 x 10⁷, and 3×10⁷ CAR+ T cells/kg of subject weight was administered.

[1053] In another clinical trial (Trial #3), T cells expressing an anti-CD19 CAR were administered that differed in the antigen-binding domain, spacer and the costimulatory signaling domain of the CAR described in each of the clinical trials above, whereby the CAR contained an anti-CD19 scFv that was derived from the murine antibody FMC63, an immunoglobulin spacer, a transmembrane domain derived from CD28, a costimulatory region derived from 4-1BB, and a CD3-zeta intracellular signaling domain. In Trial #3, the subjects were administered one of three different doses, 2×10⁵, 2×10⁶, or 2×10⁷ CAR+ T cells /kg of subject weight, 48 to 96 hours after lymphodepleting chemotherapy. In the different clinical trials, the subjects were monitored for clinical response and adverse outcomes. Neurotoxicity was graded on a 0-5 scale as described in Example 1. The presence or absence of the Philadelphia chromosome was assessed. In the three clinical trials examined, 100 Ph− subjects and 29 PH+ subjects were identified.

[1054] The number of subjects with a PH+ or Ph− molecular subtype of ALL that did or did not go on to develop indicated degrees of neurotoxicity is indicated in Table E6A, with total numbers from all three clinical trials shown in Tables E6B and E6C, respectively. Subjects with Ph− molecular subtype ALL generally were observed to develop higher degrees of neurotoxicity following administration of the CAR+ T cells, as opposed to the PH+ subjects. As shown in Table E6-B, a smaller percentage of PH+ subjects went on to develop a neurotoxicity of grade of 3 or higher compared to subjects with Ph− molecular subtype, and no incidents of grade 4 or 5 neurotoxicity were observed in subjects with PH+ molecular subtype ALL, as compared to a rate of 14% in subjects with Ph− molecular subtype. The results indicated an association of Ph− status and development of grade 4 or 5 neurotoxicity after administration of the CAR+ T cell composition in this study (p<0.05).

TABLE E6A
Number of Ph− and Ph+ subjects experiencing
the indicated grade of neurotoxicity

| | | Maximum Neurotoxicity Grade | | | | | |
|---|---|---|---|---|---|---|---|
| TRIAL | Status | 0 | 1 | 2 | 3 | 4 | 5 |
| Trial #1 | Ph− | 5 | 3 | 2 | 9 | 2 | 5 |
| | Ph+ | 1 | 1 | 1 | 2 | 0 | 0 |
| Trial #2 | Ph− | 14 | 5 | 0 | 14 | 3 | 0 |
| | Ph+ | 6 | 3 | 2 | 4 | 0 | 0 |
| Trial #3 | Ph− | 19 | 4 | 3 | 8 | 2 | 2 |
| | Ph+ | 3 | 2 | 2 | 2 | 0 | 0 |
| Combined | Ph− | 38 | 12 | 5 | 31 | 7 | 7 |
| | Ph+ | 10 | 6 | 5 | 8 | 0 | 0 |

TABLE E6B
Number of Ph− and Ph+ subjects experiencing
the indicated grade of neurotoxicity

| | Neurotoxicity Grade | | % Grade |
|---|---|---|---|
| Status | 0-2 | 3-5 | 3-5 |
| Ph− | 55 | 45 | 45% |
| Ph+ | 21 | 8 | 8% |

TABLE E6C
Number of Ph− and Ph+ subjects experiencing
the indicated grade of neurotoxicity

| | Neurotoxicity Grade | | % Grade |
|---|---|---|---|
| Status | 0-3 | 4-5 | 3-5 |
| Ph− | 86 | 14 | 14% |
| Ph+ | 29 | 0 | 0% |

[1055] Development of grades of neurotoxicity following CAR-T cell administration was assessed for ALL subjects of Trial #1 and an additional clinical trial (Trial #4) who were or were not determined to be either positive for a Ph-like gene profile (via BMA gene expression analysis) or determined to be of the PH+ molecular subtype (such subjects exhibiting these features designated Ph+/Ph-like; other subjects designated Non-Ph). Trial #4 included children and young adults having recurrent or refractory CD19+ ALL that were administered autologous T cell compositions containing cells expressing the same anti-CD19 CAR as used in Trial #3. Subjects in Trial #4 received a dose of 0.5×10⁶, 1×10⁶, 5×10⁶, or 10×10⁶ total cells per kg of subject weight at a ratio of 1:1 CD4+ cells to CD8+ cells.

[1056] The subjects of both trials were monitored for clinical response and adverse outcomes, and neurotoxicity was graded on a 0-5 scale as described in Example 1. Results are set forth in Tables E7 and E8. In both trials, fewer of the Ph+/Ph-like subjects went on to develop neurotoxicity of grades 3 or greater (3+) following treatment, as compared to the non-Ph subjects. No grade 4 or grade 5 neurotoxicity was observed in Ph+/Ph-like subjects in either clinical trial. The lack of observed grade 4 or 5 neurotoxicity events in PH+ or Ph-like subjects of Trials #2-4 was consistent with the low risk associated with neurotoxicity in PH+ or Ph-like subjects extending beyond the clinical trial described in Example 1.

TABLE E7
Number of Ph+/Ph-like and non-Ph subjects from Trial #1 experiencing
the indicated grade of neurotoxicity

| | Neurotoxicity Grade | | | Neurotoxicity Grade | | | |
|---|---|---|---|---|---|---|---|
| | No | | | No | | | |
| Status | (0-2) | 3+ | P value | (0-3) | 4-5 | 5 | P value |
| non-Ph | 3 | 12 (80%) | 0.03 | 8 | 7 | 5 | 0.0002 |
| Ph+/ | 10 | 6 (38%) | | 16 | 0 | 0 | |
| Ph-like | | | | | | | |

TABLE E8
Number of Ph+/Ph-like and non-Ph subjects from Trial #4 experiencing
the indicated neurotoxicity grades

Neurotoxicity Grade

| Status | 0-2 | 3-5 | 0-3 | 4-5 |
|---|---|---|---|---|
| non-Ph | 27 | 8 | 32 | 3 |
| Ph+/Ph-like | 7 | 1 | 8 | 0 |

[1057] The low incidence of grade 3 or higher neurotoxicity among Ph-like or PH+ subjects was consistent across the different trials examined that spanned adult and pediatric ALL subjects, and different anti-CD19 CARs products containing different costimulatory domains, spacers, and binding domains, and produced by different processes. Across all of the 172 total subjects from these four clinical trials, no grade of 4 or 5 neurotoxicity was observed in PH+ or Ph-like subjects. These results are consistent with different degrees of risk for anti-CD19 CAR T associated neurotoxicity among subjects with different B-ALL molecular subtypes, with Ph-like subjects being at significantly lower risk than non Ph-like patients. These results are also in agreement with a role of stratification by molecular subtype or gene expression signature in identifying patients at elevated risk for severe NT.

### Example 5

### Association of Protein Analytes in Plasma With Development of Neurotoxicity Following CAR+ T Cell Therapy

[1058] Plasma samples, collected from a group of the subjects with ALL described in Example 1, at one day prior to infusion with the anti-CD19 CAR-T cell composition (pre-dose), and two, four, and seven days subsequent to (post-dose) the administration of the anti-CD19 CAR-T cell composition, were assessed for levels of various factors. As described in Example 1, following administration of the CAR+ T cell composition, subjects had been monitored for clinical response and adverse outcomes, and neurotoxicity graded on a 0-5 scale. Plasma samples were analyzed with an immunoassay (Meso Scale Discovery) to assess amounts of soluble versions of the proteins listed in Table E9.

TABLE E9
Proteins assessed by immunoassay

| | |
|---|---|
| Angiopoietin 1 | MCP-4 |
| Angiopoietin 2 | MDC |
| Brain derived | Mesothelin |
| neurotropic factor | |
| CTACK (CCL27) | MIP-1α |
| Endoglin | MIP-1β |
| Eotaxin | MIP-3α |
| Eotaxin-3 | MIP-3β |
| EPO | MMP-9 |
| E-Selectin | NSE |
| FAS | Osteocalcin |
| FasL | PRDX6 |
| Fractalkine | P-Selectin |
| GRO-α | RANTES |
| I-309 | Resistin |
| ICAM-1 | S100β |
| ICAM-3 | SAA |
| IL-1Ra | SDF-1α |
| IL-6R | CCL17 (TARC) |
| IP-10 | Thrombomodulin |
| I-TAC | VCAM-1 |
| MCP-1 | vWF |
| MCP-3 | YKL-40 |

[1059] Expression levels of each of the proteins in plasma samples of individual subjects were assessed, post facto, and compared among subjects based on development (or lack thereof) of neurotoxicity; specifically, expression levels in subjects that developed no (grade 0) or grade 1 neurotoxicity were compared to those observed in subjects that had neurotoxicity of grade 4 or 5. Wilcoxon statistical comparisons were performed for each protein at each time point.

[1060] As shown in Table E10, a significant difference between protein levels of certain assessed plasma analytes was observed in subjects who went on to develop grade 0-1 neurotoxicity as compared to those who went on to develop grade 4-5 neurotoxicity at various assessed time points. As shown in FIGS. 5-9, protein levels in plasma of soluble versions of CCL17/TARC, which can play a role in T cell trafficking and activation (FIGS. 5A and 5B), Endoglin (FIG. 6), E-selectin (FIG. 7), ICAM-3 (FIG. 8), IL-6R (FIG. 9) were observed in pre-dose samples to negatively correlate to the development of higher grades of neurotoxicity (higher expression in pre-dose plasma samples from subjects with grade 0-1 neurotoxicity versus grade 4-5 neurotoxicity). Higher levels of Endoglin and E-Selectin were observed in samples from subjects with grade 0-1, as opposed to grade 4-5, neurotoxicity. Without wishing to be bound by theory, each of these analytes in some aspects is expressed on vascular endothelial cells and/or is associated with endothelial cell activation, vascular permeability and/or angiogenesis. In some embodiments, provided are compositions and methods for predicting risk of neurotoxicity involving assessing one or more analytes; in some aspects, one or more of the analytes is expressed on vascular endothelial cells and/or is associated with endothelial cell activation, vascular permeability and/or angiogenesis, and increased levels of such analyte(s) is associated with an increased risk of developing a toxicity or a severe form thereof, such as grade 4 or higher neurotoxicity.

[1061] Table E10 lists p values reflective of differences observed (p values indicated) among the different groups of subjects (grade 0-1 vs grade 4-5 neurotoxicity) in plasma levels of the indicated exemplary proteins, for plasma samples taken pre-dose and/or the indicated post-treatment time-points.

[1062] For example, plasma levels of Endoglin and ICAM-3 were observed to be different among these groups when assessed pre-dose, and were also observed to be different in post-dose plasma taken at various time-points (in each case, higher values were observed in subjects experiencing grade 0-1 versus those experiencing grade 4-5 neurotoxicity). Pre-dose plasma levels of CCL17, a chemokine highly expressed in samples associated with low neurotoxicity in the clinical trial described in Example 1 and in Ph-like B-ALL datasets, were also significantly higher in subjects experiencing grade 0 and 1 versus those experiencing grade 4 and 5 neurotoxicity.

TABLE E10
Proteins with significant differences between samples
associated grade 0-1 and grade 4-5 neurotoxicity

| Analyte | Pre dose | Day 2 | Day 4 | Day 7 |
|---|---|---|---|---|
| CCL27 | | | 0.044 | |
| Endoglin | 0.0082 | 0.0034 | 0.0059 | 0.0027 |
| E-Selectin | 0.05 | | | |
| FAS | | | | 0.039 |
| Fractalkine | | | | |
| I-309 | | | 0.044 | |
| ICAM-3 | 0.0053 | 0.0034 | 0.0015 | 0.0056 |
| IL-6R | 0.027 | | | |
| NSE | | | | 0.051 |
| P-Selectin | | | | 0.011 |
| Resistin | | | | 0.039 |
| S100β | | | | 0.052 |
| CCL17 (TARC) | 0.038 | | 0.057 | |
| Thrombomodulin | | | 0.011 | 0.011 |
| vWF | | | | 0.068 |

[1063] Pre-dose plasma samples were also analyzed with a Luminex multiplex assay to assess amounts of CCL17, E-selectin, Endoglin, ICAM-3, and soluble IL-6R (sIL6R). Amounts of each protein measured from subjects that developed no or grade 1 neurotoxicity (<2) were compared to those observed in subjects that had neurotoxicity of grades 3 or greater (>2). Consistent with the results obtained from the Meso Scale Discovery immunoassay, significantly higher amounts of each protein were observed in plasma sample collected from subjects that developed <2 neurotoxicity (FIG. 10).

### Example 6

### Additional Baseline Factors Associated With Development of Neurotoxicity Following CAR+ T Cell Therapy

[1064] Additional baseline factors, measured prior to treatment with CAR-T cell compositions in a number of different clinical studies for B cell malignancies such as ALL and NHL, were assessed and compared among subjects that had and that had not developed grade 3 or higher neurotoxicity. Data from 3 clinical trials were analyzed (including the study described in Example 1, that involved anti-CD19 CAR-T treatment in subjects with ALL (Trial 1), a clinical study involving a similar anti-CD19 CAR treatment administered to subjects with relapsed or refractory adult ALL (Trial 2), and an additional clinical trial in which subjects with B-cell malignancies, including ALL and non-Hodgkin lymphoma (NHL), were treated with cells expressing a different anti-CD19 CAR(Trial 3)). Subjects were administered anti-CD19 CAR-T cell compositions and monitored for clinical response and adverse outcomes. Neurotoxicity was graded on a 0-5 scale as described in Example 1.

[1065] Baseline factors were analyzed, post facto, and compared among subjects using a number of statistical analyses. Exemplary baseline factors that were observed to be associated with grade 3 or greater neurotoxicity in the subjects are listed in Table Ell below, including levels of serum IL-15 and platelet cell counts prior to administration of CAR-T cells, disease type (non-Hodgkin lymphoma (NHL) as compared to ALL), and disease burden as defined by percentages of blasts in the bone marrow.

TABLE E11
Exemplary baseline factors associated with Grade 3 or greater neurotoxicity

| Baseline | | | | | | |
|---|---|---|---|---|---|---|
| Factor | Indication | Criterion | Gr ≥ 3 NTX | | P value^{a} | Source |
| Inflammatory | B-Cell | High IL-15 | 26/45 | (58%) | <.0001 | Trial 1 |
| marker: | malignancies | Low IL-15 | 19/109 | (17%) | | Trial 3 |
| Serum IL-15 | | | | | | |
| Platelet Count | ALL | <120 K | 60/162 | (37%) | .002 | Trail 1 |
| | | >120 K | 9/60 | (15%) | | Trial 2 |
| | | | | | | Trial 3 |
| Disease Type | B-Cell | ALL | 14/47 | (30%) | .003 | Trial 3 |
| | malignancies | NHL | 8/62 | (13%) | | |
| Disease | ALL | ≥5% BM | 40/94 | (43%) | .02 | Trail 1 |
| Burden | | blasts | | | | Trial 2 |
| | | <5% BM | 9/42 | (21%) | | Trial 3 |
| | | blasts | | | | |

^{a}Two sided Fisher's exact test
^{b}High IL-15 ≥ 30 pg/mL.

[1066] Blood samples collected from subjects at various time points after administration of CAR-T cells in Trial 1 were analyzed for CAR+-T cell counts. Serum levels of cytokines, e.g., IL-15, from the subjects were assessed at pre-treatment (screening) and various post-treatment time-points (day 2, day 4, and day 7). The results demonstrated that prolonged and fatal neurotoxicity correlated with early and rapid rise in levels of IL-15, a T cell promoting cytokine, and CAR T cell expansion.

[1067] More rapid CAR-T expansion and earlier peak expansion of CAR-expressing T cells was observed in the blood of subjects that went on to develop more severe neurotoxicity, and in particular those who developed grade 5 neurotoxicity and cerebral edema. For example, results indicated that these subjects had exhibited a detectable level of CAR+cells per μl of blood within 4-7 days after the first dose of cells, with greater than 20 CAR+cells per μl of blood observed in blood of all such subjects within seven days after cells were administered. In subjects with less severe neurotoxicity, peak expansion of CAR+ T cells generally was observed later and with a lower peak number of CAR+ T cells per microliter (FIG. 10).

[1068] For the group of subjects that had experienced earlier peak CAR-T cell expansion (peak CAR+-T numbers by day 7), higher medium baseline serum IL-15 levels and a steeper increase in serum IL-15 through day 4 post-administration were observed, as compared to subjects with later peak CAR T cell expansion (FIG. 11). By the next time-point (day 7) at which serum IL-15 levels were measured, serum IL-15 levels in these subjects with rapid peak expansion had declined and were approximately comparable to or below levels in subjects with later peak expansion. The results were consistent with a conclusion that baseline serum IL-15 levels and/or higher or rapid increases in IL-15 levels, may indicate or correlate with potential risk for neurotoxicity or cerebral edema or severity thereof, following CAR-T cell treatment. Lymphodepleting and bridging chemotherapies are also observed to be associated with an increase in T cell proliferation-promoting cytokines such as IL-15.

[1069] The present invention is not intended to be limited in scope to the particular disclosed embodiments, which are provided, for example, to illustrate various aspects of the invention. Various modifications to the compositions and methods described will become apparent from the description and teachings herein. Such variations may be practiced without departing from the true scope and spirit of the disclosure and are intended to fall within the scope of the present disclosure.

Summary of Sequences

| # | ANNOTATION |
|---|---|
| 1 | carbonic anhydrase 6 (isoform 1) |
| 2 | carbonic anhydrase 6 (isoform 2) |
| 3 | carbonic anhydrase 6 (isoform 3) |
| 4 | carbonic anhydrase 6 (isoform 4) |
| 5 | C-C motif chemokine ligand 17 |
| 6 | C-C motif chemokine receptor 6 |
| 7 | enamelin |
| 8 | growth arrest specific 6 |
| 9 | guanylate binding protein 5 |
| 10 | GLI family zinc finger 2 |
| 11 | adhesion G protein-coupled receptor F1 (Isoform I) |
| 12 | adhesion G protein-coupled receptor F1 (Isoform 2) |
| 13 | interferon induced transmembrane protein 1 |
| 14 | joining chain of multimeric IgA and IgM |
| 15 | Mucin 4 (isoform A) |
| 16 | Mucin 4 (isoform D) |
| 17 | Mucin 4 (isoform E) |
| 18 | Mucin 4 (isoform F) |
| 19 | paraoxonase 2 (isoform 1) |
| 20 | paraoxonase 2 (isoform 2) |
| 21 | protein tyrosine phosphatase type IVA, member 3 (isoform 1) |
| 22 | protein tyrosine phosphatase type IVA, member 3 (isoform 2) |
| 23 | semaphorin 6A |
| 24 | solute carrier family 37 member 3 |
| 25 | Spermato-genesis associated serine rich 2 like |
| 26 | Trans-membrane protein 154 |
| 27 | tumor protein p53 inducible nuclear protein 1 (isoform a) |
| 28 | tumor protein p53 inducible nuclear protein 1 (isoform b) |
| 29 | Wnt family member 9A |
| 30 | ArfGAP with SH3 domain, ankyrin repeat and PH domain 2 |
| 31 | formin like 2 |
| 32 | G protein-coupled receptor 176 (isoform 1) |
| 33 | G protein-coupled receptor 176 (isoform 2) |
| 34 | G protein-coupled receptor 176 (isoform 3) |
| 35 | MyoD family inhibitor (isoform 1) |
| 36 | MyoD family inhibitor (isoform 2) |
| 37 | protocadherin gamma subfamily A, 12 (isoform 1) |
| 38 | protocadherin gamma subfamily A, 12 (isoform 2) |
| 39 | protocadherin gamma subfamily A, 6 (isoform 1) |
| 40 | protocadherin gamma subfamily A, 6 (isoform 2) |
| 41 | protocadherin gamma subfamily B, 6 (isoform 1) |
| 42 | protocadherin gamma subfamily B, 6 (isoform 2) |
| 43 | phospholipase A2 inhibitor and LY6/PLAUR domain |
| | containing (isoform 1) |
| 44 | phospholipase A2 inhibitor and LY6/PLAUR domain |
| | containing (isoform 2) |
| 45 | Protein patched homolog 1 (Isoform L) |
| 46 | Protein patched homolog 1 (Isoform M) |
| 47 | Protein patched homolog 1 (Isoform S) |
| 48 | tetratricopeptide repeat domain 28 |
| 49 | carbonic anhydrase 6 (isoform 1) |
| 50 | carbonic anhydrase 6 (isoform 2) |
| 51 | carbonic anhydrase 6 (isoform 3) |
| 52 | carbonic anhydrase 6 (isoform 4) |
| 53 | C-C motif chemokine ligand 17 |
| 54 | C-C motif chemokine receptor 6 |
| 55 | enamelin |
| 56 | growth arrest specific 6 |
| 57 | guanylate binding protein 5 |
| 58 | GLI family zinc finger 2 |
| 59 | adhesion G protein-coupled receptor F1 (Isoform I) |
| 60 | adhesion G protein-coupled receptor F1 (Isoform 2) |
| 61 | interferon induced transmembrane protein 1 |
| 62 | joining chain of multimeric IgA and IgM |
| 63 | Mucin 4 (isoform A) |
| 64 | Mucin 4 (isoform D) |
| 65 | Mucin 4 (isoform E) |
| 66 | Mucin 4 (isoform F) |
| 67 | paraoxonase 2 (isoform 1) |
| 68 | paraoxonase 2 (isoform 2) |
| 69 | protein tyrosine phosphatase type IVA, member 3 (isoform 1) |
| 70 | protein tyrosine phosphatase type IVA, member 3 (isoform 2) |
| 71 | semaphorin 6A |
| 72 | solute carrier family 37 member 3 |
| 73 | spermatogenesis associated serine rich 2 like |
| 74 | transmembrane protein 154 |
| 75 | tumor protein p53 inducible nuclear protein 1 (isoform a) |
| 76 | tumor protein p53 inducible nuclear protein 1 (isoform b) |
| 77 | Wnt family member 9A |
| 78 | ArfGAP with SH3 domain, ankyrin repeat and PH domain 2 |
| 79 | formin like 2 |
| 80 | G protein-coupled receptor 176 (isoform 1) |
| 81 | G protein-coupled receptor 176 (isoform 2) |
| 82 | G protein-coupled receptor 176 (isoform 3) |
| 83 | MyoD family inhibitor (isoform 1) |
| 84 | MyoD family inhibitor (isoform 2) |
| 85 | Protocadherin gamma subfamily A, 12 (isoform 1) |
| 86 | Protocadherin gamma subfamily A, 12 (isoform 2) |
| 87 | Protocadherin gamma subfamily A, 6 (isoform 1) |
| 88 | Protocadherin gamma subfamily A, 6 (isoform 2) |
| 89 | Protocadherin gamma subfamily B, 6 (isoform 1) |
| 90 | Protocadherin gamma subfamily B, 6 (isoform 2) |
| 91 | phospholipase A2 inhibitor and LY6/PLAUR domain |
| | containing (isoform 1) |
| 92 | phospholipase A2 inhibitor and LY6/PLAUR domain |
| | containing (isoform 2) |
| 93 | Protein patched homolog 1 (Isoform L) |
| 94 | Protein patched homolog 1 (Isoform M) |
| 95 | Protein patched homolog 1 (Isoform S) |
| 96 | TTC28 |
| 97 | IL2RA isoform 1 precursor mRNA transcript |
| 98 | IL2RA isoform 2 precursor mRNA transcript |
| 99 | IL2RA isoform 3 precursor mRNA transcript |
| 100 | ATP9A mRNA |
| 101 | HMX3 mRNA |
| 102 | DPYSL3 isoform 1 mRNA |
| 103 | DPYSL3 isoform 2 mRNA |
| 104 | ZNF415 isoform 1 mRNA |
| 105 | ZNF415 isoform 2 mRNA |
| 106 | ZNF415 isoform 3 mRNA |
| 107 | ZNF415 isoform 4 mRNA |
| 108 | ZNF415 isoform 5 mRNA |
| 109 | ZNF415 isoform 6 mRNA |
| 110 | ZNF415 isoform 7 mRNA |
| 111 | ZNF415 isoform 8 mRNA |
| 112 | ZNF415 isoform 9 mRNA |
| 113 | IRX5 isoform 1 mRNA |
| 114 | IRX5 isoform 2 mRNA |
| 115 | TMPRSS15 mRNA |
| 116 | IL3RA isoform 1 mRNA |
| 117 | IL3RA isoform 2 mRNA |
| 118 | IGF2BP1 isoform 1 mRNA |
| 119 | IGF2BP1 isoform 2 mRNA |
| 120 | IL2RA Protein isoform 1 precursor |
| 121 | IL2RA Protein isoform 2 precursor |
| 122 | IL2RA Protein isoform 3 precursor |
| 123 | ATP9A protein |
| 124 | HMX3 protein |
| 125 | DPYSL3 isoform 1 protein |
| 126 | DPYSL3 isoform 2 protein |
| 127 | ZNF415 isoform 1 protein |
| 128 | ZNF415 isoform 2 protein |
| 129 | ZNF415 isoform 3 protein |
| 130 | ZNF415 isoform 4 protein |
| 131 | ZNF415 isoform 5 protein |
| 132 | ZNF415 isoform 6 protein |
| 133 | ZNF415 isoform 7 protein |
| 134 | ZNF415 isoform 8 protein |
| 135 | ZNF415 isoform 9 protein |
| 136 | IRX5 isoform 1 protein |
| 137 | IRX5 isoform 2 protein |
| 138 | TMPRSS15 protein |
| 139 | IL3RA isoform 1 protein |
| 140 | IL3RA isoform 2 protein |
| 141 | IGF2BP1 isoform 1 protein |
| 142 | IGF2BP1 isoform 2 protein |
| 143 | PCDHGB5 isoform 1 mRNA |
| 144 | PCDHGB5 Isoform 2 mRNA |
| 145 | PCDHGB5 isoform 1 Protein |
| 146 | PCDHGB5 Isoform 2 Protein |
| 147 | spacer (IgG4hinge) (aa) Homo sapiens |
| 148 | spacer (IgG4hinge) (nt) Homo sapiens |
| 149 | Hinge-CH3 spacer Homo sapiens |
| 150 | Hinge-CH2-CH3 spacer Homo sapiens |
| 151 | IgD-hinge-Fc Homo sapiens |
| 152 | T2A artificial |
| 153 | tEGFR artificial |
| 154 | CD28 (amino acids 153-179 of Accession No. |
| | P10747)Homo sapiens |
| 155 | CD28 (amino acids 114-179 of Accession No. P10747) |
| | Homo sapiens |
| 156 | CD28 (amino acids 180-220 of P10747)Homo sapiens |
| 157 | CD28 (LL to GG)Homo sapiens |
| 158 | 4-1BB (amino acids 214-255 of Q07011.1) Homo sapiens |
| 159 | CD3 zeta Homo sapiens |
| 160 | CD3 zeta Homo sapiens |
| 161 | CD3 zeta Homo sapiens |
| 162 | tEGFR artificial |
| 163 | 2A element T2A |
| 164 | 2A element P2A |
| 165 | 2A element P2A |
| 166 | 2A element E2A |
| 167 | 2A element F2A |
| 168 | Exemplary linker sequence |
| 169 | Exemplary linker sequence |
| 170 | Exemplary linker sequence |
| 171 | Exemplary linker sequence |
| 172 | Exemplary spacer derived from Ig hinge |
| 173 | Exemplary spacer derived from Ig hinge |
| 174 | Exemplary spacer derived from Ig hinge |
| 175 | Exemplary spacer derived from Ig hinge |
| 176 | Exemplary spacer derived from Ig hinge |
| 177 | Exemplary spacer derived from Ig hinge |
| 178 | Exemplary spacer derived from Ig hinge |
| 179 | Exemplary spacer derived from Ig hinge |
| 180 | FMC63 LC-CDR3 |
| 181 | FMC63 CDR L1 |
| 182 | FMC63 CDR L2 |
| 183 | FMC63 CDR L3 |
| 184 | FMC63 CDR H1 |
| 185 | FMC63 CDR H2 |
| 186 | FMC63 CDR H3 |
| 187 | FMC63 VH |
| 188 | FMC63 VL |
| 189 | FMC63 scFv |
| 190 | SJ25C1 CDR L1 |
| 191 | SJ25C1 CDR L2 |
| 192 | SJ25C1 CDR L3 |
| 193 | SJ25C1 CDR H1 |
| 194 | SJ25C1 CDR H2 |
| 195 | SJ25C1 CDR H3 |
| 196 | SJ25C1 VH |
| 197 | SJ25C1 VL |
| 198 | Linker |
| 199 | SJ25C1 scFv |
| 200 | FMC63 HC-CDR3 |
| 201 | FMC63 LC-CDR2 |
| 202 | Linker |
| 203 | Sequence encoding scFv |

What is claimed:

1. A method of assessing a risk of a toxicity or a toxicity-related outcome, following administration of an immunotherapy, the method comprising:
(1) assessing the presence, absence or level of expression of one or more gene products or portions thereof in a sample from a subject that is a candidate for receiving a immunotherapy for treatment of a disease or condition, wherein the disease or condition is acute lymphoblastic leukemia (ALL) or a subtype thereof, wherein:
the one or more gene products is associated with a risk of developing neurotoxicity following administration of the immunotherapy; and
the sample does not comprise the immunotherapy and/or is obtained from the subject prior to receiving the immunotherapy; and
(2) comparing the presence, absence or level of expression of the one or more gene products or portions thereof to a gene reference value, wherein the comparison indicates the risk or likely risk of the subject developing a neurotoxicity, optionally a specified grade or severity of neurotoxicity, following administration of the therapy to the subject.

2. The method of claim 1, wherein each of the one or more gene products is individually compared to a gene reference value for the respective gene product.

3. The method of claim 1 or claim 2, wherein:
(a) at least one of the one or more gene products is from a first group of gene products that negatively correlate to a risk of developing neurotoxicity; and/or
(b) at least one of the one or more gene products is from a second group of gene products that positively correlates to a risk of developing neurotoxicity.

4. The method of claim 3, wherein:
the at least one gene product is from (a) and is selected from CCL17, ABCA9, ADAMTSL4, ADGRA2, ADGRF1, AK5, APOL1, ARHGAP27, ARID3B, CA6, CABP7, CCDC152, CCR1, CCR6, CEP85L, CISH, CR2, ENAM, ENPP2, EPHA4, FTH1P11, FTH1P2, FTH1P8, GADD45A, GAS6, GBP3, GBP5, GBP6, GIMAP1-GIMAP5, GLI2, GPA33, GPRIN3, HSPA1A, IFITM1, IFITM3, IL15, IL2RA, JCHAIN, KIAA1257, LA16c-390H2.4, LAMB1, LDB3, LINC00623, LST1, LTB, LY6E, MAS 1, MUC4, NLRC3, PLXNA4, PON2, PTGES3P1, PTP4A3, RNU1-1, RP11-345J4.6, RP11-421N8.1, RP11-51J9.5, RP11-51O6.1, RP11-552F3.9, RP11-686D22.9, RP11-723D22.3, RP11-723O4.6, RP13-512J5.1, RP4-620F22.2, RP5-940J5.9, RP6-109B7.5, RPL21P75, RYR2, SAMD9L, SEMA6A, SLC37A3, SNRPEP4, SOCS1, SPATS2L, SPON1, SV2C, TMEM154, TP53INP1, TNF, TRIM47, UST, WNT9A, ENG, SELE, ICAM3, or IL6R, or is a portion or fragment thereof; and/or
the at least one gene product is from (b) and is selected from PINLYP, PCDHGA12, ASAP2, ATP8B1, ATP9A, CCNA1, CDHR3, CECR2, CELF4, DLX1, DPYSL3, EHD4, FMNL2, GGA2, GPR176, HHIPL1, HOXA7, HMX3, IGF2BP1, IL3RA, IRX3, IRX5, KCNIP1, KIAA1644, LINC00092, LINC01483, MDFI, MIB1, MMP14, NOM1, OTOA, PCDHGA4, PCDHGA6, PCDHGB1, PCDHGB5, PCDHGB6, PPM1E, PRKD1, PROKR2, PRSS12, PRTG, PTCH1, RFX8, RP11-146B14.1, RP11-3P17.5, RP11-41O4.1, RP11-713N11.4, RP4-568B10.1, SERF1A, SEZ6L, SMURF1, TBC1D30, TCF12, TCP11, TM9SF3, TMPRSS15, TMSB15A, TNKS1BP1, TREM2, TTC28, PCDHGA9, FMNL1, or ZNF415 or is a portion or fragment thereof.

5. A method of assessing a risk of toxicity following administration of an immunotherapy, the method comprising:
(1) assessing the presence, absence or level of expression of one or more gene products or a portion thereof in a sample from a subject that is a candidate for receiving a immunotherapy for treating a disease or condition, wherein the disease or condition is acute lymphoblastic leukemia (ALL) or a subtype thereof, wherein:
(a) at least one of the one or more gene products is selected from CCL17, ABCA9, ADAMTSL4, ADGRA2, ADGRF1, AKS, APOL1, ARHGAP27, ARID3B, CA6, CABP7, CCDC152, CCR1, CCR6, CEP85L, CISH, CR2, ENAM, ENPP2, EPHA4, FTH1P11, FTH1P2, FTH1P8, GADD45A, GAS6, GBP3, GBP5, GBP6, GIMAP1-GIMAPS, GLI2, GPA33, GPRIN3, HSPA1A, IFITM1, IFITM3, IL15, IL2RA, JCHAIN, KIAA1257, LA16c-390H2.4, LAMB1, LDB3, LINC00623, LST1, LTB, LY6E, MAS1, MUC4, NLRC3, PLXNA4, PON2, PTGES3P1, PTP4A3, RNU1-1, RP11-345J4.6, RP11-421N8.1, RP11-51J9.5, RP11-51O6.1, RP11-552F3.9, RP11-686D22.9, RP11-723D22.3, RP11-723O4.6, RP13-512J5.1, RP4-620F22.2, RP5-940J5.9, RP6-109B7.5, RPL21P75, RYR2, SAMD9L, SEMA6A, SLC37A3, SNRPEP4, SOCS1, SPATS2L, SPON1, SV2C, TMEM154, TP53INP1, TNF, TRIM47, UST, WNT9A, ENG, SELE, ICAM3, or IL6R, or is a portion or fragment thereof, optionally wherein said one or more gene products negatively correlate to a risk of developing neurotoxicity; and/or
(b) at least one of the one or more gene products is selected from ASAP2, ATP8B1, ATP9A, CCNA1, CDHR3, CECR2, CELF4, DLX1, DPYSL3, EHD4, FMNL2, GGA2, GPR176, HHIPL1, HOXA7, HMX3, IGF2BP1, IL3RA, IRX3, IRX5, KCNIP1, KIAA1644, LINC00092, LINC01483, MDFI, MIB1, MMP14, NOM1, OTOA, PCDHGA12, PCDHGA4, PCDHGA6, PCDHGB1, PCDHGB5, PCDHGB6, PINLYP, PPM1E, PRKD1, PROKR2, PRSS12, PRTG, PTCH1, RFX8, RP11-146B14.1, RP11-3P17.5, RP11-41O4.1, RP11-713N11.4, RP4-568B10.1, SERF1A, SEZ6L, SMURF1, TBC1D30, TCF12, TCP11, TM9SF3, TMPRSS15, TMSB15A, TNKS1BP1, TREM2, TTC28, PCDHGA9, FMNL1, or ZNF415 or is a portion or fragment thereof, optionally wherein said one or more gene products positively correlates to a risk of developing neurotoxicity; and
(2) comparing the presence, absence or level of expression of the one or more gene product to a gene reference value, wherein the comparison indicates whether the subject is or is likely at risk of developing a neurotoxicity or grade or severity thereof following administration of the immunotherapy when administered to the subject.

6. The method of claim 5, wherein each of the one or more gene products is individually compared to a gene reference value for the respective gene product.

7. The method of any of claims 1-6, wherein the immunotherapy is a cell therapy or is a T cell-engaging therapy, optionally wherein the cell therapy comprises cells engineered to express a recombinant receptor.

8. The method of claim 5, claim 6 or claim 7, wherein the sample does not comprise the immunotherapy, and/or is obtained from the subject prior to receiving the immunotherapy, optionally wherein the immunotherapy is a cell therapy.

9. The method of any of claims 1-8, wherein the sample does not contain cells genetically engineered with the recombinant receptor.

10. The method of any of claims 3-9, wherein:
the comparison indicates the subject is or is likely at risk of developing neurotoxicity if the at least one gene product of (a) is at or below a gene reference value and/or the at least one gene product of (b) is at or above a gene reference value; or the comparison indicates the subject is not or is likely not at risk of developing neurotoxicity if the at least one gene product of (a) is above a gene reference value and/or the at least one gene product of (b) is below a gene reference value.

11. The method of claim 10, wherein if the comparison indicates the subject is or is likely to develop neurotoxicity, selecting the subject for administration of a therapeutic regimen, the therapeutic regimen comprising administering to the subject:
i. an agent or other treatment capable of treating, preventing, delaying, reducing or attenuating the development or risk of development of a toxicity and the immunotherapy, wherein administration of the agent is to be administered (i) prior to, (ii) within one, two, or three days of, (iii) concurrently with and/or (iv) at first fever following, the initiation of administration of the immunotherapy to the subject;
ii. the immunotherapy at a reduced dose or at a dose that is not associated with risk of developing toxicity or severe toxicity, or is not associated with a risk of developing a toxicity or severe toxicity in a majority of subjects, and/or a majority of subjects having a disease or condition that the subject has or is suspected of having, following administration of the immunotherapy;
iii. the immunotherapy in an in-patient setting and/or with admission to the hospital for one or more days, optionally wherein the immunotherapy is otherwise to be administered to subjects on an outpatient basis or without admission to the hospital for one or more days; or iv. an alternative therapeutic treatment other than the immunotherapy.

12. The method of claim 10, wherein if the comparison indicates the subject is not or is likely not at risk of developing neurotoxicity, selecting the subject for administration of a therapeutic regimen, the therapeutic regimen comprising administering to the subject:
i. the immunotherapy, optionally at a non-reduced dose, optionally on an outpatient basis or without admission to the hospital for one or more days;
ii. the immunotherapy, wherein administration of the immunotherapy does not comprise administering, prior to or concurrently with administering the immunotherapy and/or prior to the development of a sign or symptom of toxicity other than fever, an agent or treatment capable of treating, preventing, delaying, or attenuating the development of the toxicity; or
iii. the immunotherapy in an outpatient setting and/or without admission of the subject to the hospital overnight or for one or more consecutive days and/or is without admission of the subject to the hospital for one or more days.

13. The method of claim 11 or claim 12, further comprising administering the therapeutic regimen to the selected subject.

14. A method of treatment, the method comprising administering a therapeutic regimen to a subject that is a candidate for receiving an immunotherapy for treatment of a disease or condition, wherein the disease or condition is acute lymphoblastic leukemia (ALL) or a subtype thereof, wherein the administration is carried out following or based on the results of assessing the presence, absence or level of expression, from a sample from the subject, of one or more gene products or portion thereof, wherein:
(a) at least one of the one or more gene products is selected from CCL17, ABCA9, ADAMTSL4, ADGRA2, ADGRF1, AK5, APOL1, ARHGAP27, ARID3B, CA6, CABP7, CCDC152, CCR1, CCR6, CEP85L, CISH, CR2, ENAM, ENPP2, EPHA4, FTH1P11, FTH1P2, FTH1P8, GADD45A, GAS6, GBP3, GBP5, GBP6, GIMAP1-GIMAP5, GLI2, GPA33, GPRIN3, HSPA1A, IFITM1, IFITM3, IL15, IL2RA, JCHAIN, KIAA1257, LA16c-390H2.4, LAMB1, LDB3, LINC00623, LST1, LTB, LY6E, MAS 1, MUC4, NLRC3, PLXNA4, PON2, PTGES3P1, PTP4A3, RNU1-1, RP11-345J4.6, RP11-421N8.1, RP11-51J9.5, RP11-51O6.1, RP11-552F3.9, RP11-686D22.9, RP11-723D22.3, RP11-723O4.6, RP13-512J5.1, RP4-620F22.2, RP5-940J5.9, RP6-109B7.5, RPL21P75, RYR2, SAMD9L, SEMA6A, SLC37A3, SNRPEP4, SOCS1, SPATS2L, SPON1, SV2C, TMEM154, TP53INP1, TNF, TRIM47, UST, WNT9A, ENG, SELE, ICAM3, or IL6R, or is a portion or fragment thereof; and/or
(b) at least one of the one or more gene products is selected from ASAP2, ATP9A, CCNA1, CDHR3, CECR2, DLX1, DPYSL3, EHD4, FMNL2, GGA2, HHIPL1, HMX3, IGF2BP1, IL3RA, IRX5, KCNIP1, KIAA1644, LINC00092, LINC01483, MIB1, MMP14, NOM1, OTOA, PCDHGA12, PCDHGA4, PCDHGA6, PCDHGB5, PCDHGB6, PINLYP, PPM1E, PRKD1, PROKR2, PRTG, PTCH1, RFX8, RP11-146B14.1, RP11-3P17.5, RP11-41O4.1, RP11-713N11.4, RP4-568B10.1, SERF1A, SEZ6L, SMURF1, TBC1D30, TCF12, TCP11, TM9SF3, TMPRSS15, TNKS1BP1, TTC28, PCDHGA9, FMNL1, or ZNF415 or is a portion or fragment thereof,
wherein the presence, absence or level of the one or more gene products from (a) negatively correlate to a risk that the subject is or is likely to develop neurotoxicity following administration of the immunotherapy when it is administered, and expression of the at least one or more gene products from (b) positively correlates to a risk that the subject is or is likely to develop neurotoxicity following administration of the immunotherapy when it is administered.

15. The method of claim 14, wherein the immunotherapy is a cell therapy or is a T cell-engaging therapy, optionally wherein the cell therapy comprises cells engineered to express a recombinant receptor.

16. The method of claim 14 or 15, wherein the sample is obtained from the subject prior to receiving the immunotherapy and/or the sample does not comprise the immunotherapy.

17. The method of any of claims 14-16, wherein the results of assessing the presence, absence or level of expression of the one or more gene products or portions thereof comprises a comparison to a gene reference value, wherein the comparison indicates the risk or likely risk of the subject developing neurotoxicity following administration of the immunotherapy when administered to the subject.

18. The method of claim 17, wherein each of the one or more gene products is individually compared to a gene reference value for the respective gene product.

19. The method of any of claims 14-18, wherein if the assessing indicates the subject is or is likely to develop neurotoxicity following administration of the immunotherapy, the therapeutic regimen comprises administering to the subject:
i. an agent or other treatment capable of treating, preventing, delaying, reducing or attenuating the development or risk of development of a toxicity and the immunotherapy, wherein administration of the agent is to be administered (i) prior to, (ii) within one, two, or three days of, (iii) concurrently with and/or (iv) at first fever following, the initiation of administration of the immunotherapy to the subject;
ii. the immunotherapy at a reduced dose or at a dose that is not associated with risk of developing toxicity or severe toxicity, or is not associated with a risk of developing a toxicity or severe toxicity in a majority of subjects, and/or a majority of subjects having a disease or condition that the subject has or is suspected of having, following administration of the immunotherapy;
iii. the immunotherapy in an in-patient setting and/or with admission to the hospital for one or more days, optionally wherein the immunotherapy is otherwise to be administered to subjects on an outpatient basis or without admission to the hospital for one or more days; or iv. an alternative therapeutic treatment other than the immunotherapy.

20. The method of any of claims 14-18, wherein if the assessing indicates the subject is not or is likely not to develop neurotoxicity following administration of the immunotherapy, the therapeutic regimen comprises administering to the subject:
i. the immunotherapy, optionally at a non-reduced dose, optionally on an outpatient basis or without admission to the hospital for one or more days;
ii. the immunotherapy, wherein administration of the immunotherapy does not comprise administering, prior to or concurrently with administering the immunotherapy and/or prior to the development of a sign or symptom of toxicity other than fever, an agent or treatment capable of treating, preventing, delaying, or attenuating the development of the toxicity; or
iii. the immunotherapy in an outpatient setting and/or without admission of the subject to the hospital overnight or for one or more consecutive days and/or is without admission of the subject to the hospital for one or more days.

21. The method of any of claims 3-20, wherein the at least one gene product is from (a) and is a gene product associated with a PH+ or Ph-like molecular subtype of ALL.

22. The method of claim 21, wherein the at least one gene product is selected from CCL17, ADGRF1, BMPR1B, CA6, CCR6, CD99, CHN2, CRLF2, DENND3, ENAM, GAS6, GBP5, GLI2, IFITM1, IGJ (JCHAIN), LDB3, L0645744, MDF1C, MUC4, NRXN3, PON2, PTP4A3, S100Z, SEMA6A, SLC37A3, SLC2A5, SPATS2L, TMEM154, TP53INP1, TTYH2, IL2RA, or WNT9A, or is a portion or fragment of any of the foregoing.

23. A method of treatment, the method comprising:
selecting a subject that exhibits a Philadelphia chromosome (Ph+) and/or Ph chromosome-like (Ph-like) molecular subtype of acute lymphoblastic leukemia (ALL); and
administering to the subject an immunotherapy that binds to an antigen associated with the ALL.

24. The method of claim 23, wherein the immunotherapy is a cell therapy or is a T cell-engaging therapy, optionally wherein the cell therapy comprises cells engineered to express a recombinant receptor.

25. The method of claim 23 or claim 24, wherein:
the selected subject exhibits one or more of (9;22)(q34;q11) chromosomal abnormality; deletion or mutation of IKZF1 transcription factor; a kinase-activating alteration, optionally a rearrangement involving ABL1, ABL2, CRLF2, CSF1R, EPOR, JAK2, NTRK3, PDGFRB, PTK2B, TSLP, or TYK2; a sequence mutation involving FLT3, IL7R, SH2B3, TYK2, IL2RB, NTRK3, DGKH, KRAS, NRAS, PTPN11, NF1; and/or comprises a Ph-like gene expression signature; or
the subject is selected based on one or more of the presence of (9;22)(q34;q11) chromosomal abnormality, deletion or mutation of IKZF1 transcription factor; a kinase-activating alteration, optionally a rearrangement involving ABL1, ABL2, CRLF2, CSF1R, EPOR, JAK2, NTRK3, PDGFRB, PTK2B, TSLP, or TYK2; a sequence mutation involving FLT3, IL7R, SH2B3, TYK2, IL2RB, NTRK3, DGKH, KRAS, NRAS, PTPN11, NF1; and/or the presence of a Ph-like gene expression signature.

26. The method of claim 25, wherein the Ph-like gene signature is based on comparison of the presence, absence or level of expression, in a sample from the subject, of at least one gene product to a reference gene value, said at least one gene product is selected from:
(a) CCL17, ADGRF1, BMPR1B, CA6, CCR6, CD99, CHN2, CRLF2, DENND3, ENAM, GAS6, GBP5, GLI2, IFITM1, IGJ (JCHAIN), LDB3, L0645744, MDF1C, MUC4, NRXN3, PON2, PTP4A3, S100Z, SEMA6A, SLC37A3, SLC2A5, SPATS2L, TMEM154, TP53INP1, TTYH2, IL2RA, or WNT9A or a portion or fragment of any of the foregoing; and/or
(b) ASAP2, FMNL2, GPR176, MDFI, PCDHGA12, PCDHGA6, PCDHGB5, PCDHGB6, PINLYP, PTCH1, ATP9A, HMX3, DPYSL3, ZNF415, IRX5, TMPRSS15, IL3RA, IGF2BP1, or TTC28 or is a portion or fragment of any of the foregoing,
wherein the comparison indicates the subject exhibits a Ph-like molecular subtype of ALL if the at least one gene product of (a) is above a gene reference value and/or the at least one gene product of (b) is below a gene reference value.

27. The method of claim 26, wherein each of the one or more gene products is individually compared to a gene reference value for the respective gene product.

28. The method of any of claims 21, 22, 26 and 27, wherein the at least one gene product selected from (a) is ADGRF1, BMPR1B, CA6, CD99, CHN2, CRLF2, DENND3, ENAM, GBP5, GLI2, IFITM1, IGJ (JCHAIN), LDB3, L0645744, MDF1C, MUC4, NRXN3, PON2, S100Z, SEMA6A, SLC37A3, SLC2A5, SPATS2L, TMEM154, TP53INP1, TTYH2 or WNT9A, or is a portion of fragment of any of the foregoing.

29. The method of any of claims 3-22 and 26-28, wherein the at least one gene product selected from (a) is ADGRF1, CA6, CCL17, CCR6, ENAM, GAS6, GBP5, GLI2, IFITM1, IGJ (JCHAIN), MUC4, PON2, PTP4A3, SEMA6A, SLC37A3, SPATS2L, TMEM154, TP53INP1, IL2RA, or WNT9A or is a portion or fragment of any of the foregoing.

30. The method of any of claims 3-22 and 26-29, wherein the at least one gene product selected from (b) is ASAP2, FMNL2, GPR176, MDFI, PCDHGA12, PCDHGA6, PCDHGB5, PCDHGB6, PINLYP, PTCH1, ATP9A, HMX3, DPYSL3, ZNF415, IRX5, TMPRSS15, IL3RA, IGF2BP1, or TTC28 or is a portion or fragment of any of the foregoing.

31. The method of any of claims 1-30, wherein the subject is a human and/or the one or more gene products is human.

32. The method of any of claims 3-22 and 26-31, wherein at least one of the one or more gene products is from (a) and at least one of the one or more gene products is from (b).

33. The method of any of claims 3-22 and 26-32, wherein the one or more gene product comprises at least one gene product from (a) that is IGJ (JCHAIN), MUC4, CA6, WNT9A, ADGRF1 or CCL17, or a portion or fragment of any of the foregoing.

34. The method of any of claims 3-22 and 26-33, wherein the one or more gene products comprises at least one gene product from (a) that is CCL17 or a portion or fragment thereof.

35. The method of any of claims 3-22 and 26-34, wherein the one or more gene products comprises at least one gene product from (b) that is PINLYP, ASAP2, FMNL2, PTCH1, TTC28, PCDHGA6, PCDHGB6 or PCDHGA12, or a portion or fragment of any of the foregoing.

36. The method of any of claims 3-22 and 26-35, wherein the one or more gene products comprise at least one gene product from (b) that is PINLYP or PCDHGA12 or a portion or fragment of any of the foregoing.

37. The method of any of claims 13-36, wherein:
greater than or greater than about 30%, 35%, 40%, or 50% of the subjects treated according to the method do not exhibit any grade of cytokine release syndrome (CRS) or neurotoxicity; and/or
at least at or about 45, 50, 60, 65, 70, 75, 80, 85, 90, 95% or about 100% of subjects treated according to the method do not exhibit severe CRS, optionally grade 3 or higher, prolonged grade 3 or higher or grade 4 or 5 CRS; and/or
at least at or about 45, 50, 60, 65, 70, 75, 80, 85, 90, 95% or about 100% of subjects treated according to the method do not exhibit severe neurotoxicity, optionally grade 3 or higher, prolonged grade 3 or higher or grade 4 or 5 neurotoxicity; and/or
at least at or about 45, 50, 60, 65, 70, 75, 80, 85, 90, 95% or about 100% of subjects treated according to the method do not exhibit cerebral edema.

38. The method of any of claims 13-37, wherein:
prior to initiation of administration of the dose of cells, the subject has not been administered an agent or treatment capable of treating, preventing, delaying, reducing or attenuating the development or risk of development of a toxicity; and/or
the subject is not administered an agent or treatment for the treatment or prevention or reduction or attenuation of a neurotoxicity and/or a cytokine release syndrome or risk thereof, within a period of time following administration of the dose, which period of time is optionally at or about 1, 2, 3, 4, 5 days or is optionally at or about 6, 7, 8, 9, 10, 11 days or is optionally 1 or 2 or 3 or 4 weeks; and/or
the subject is not administered an agent or treatment for the treatment or prevention or reduction or attenuation of a neurotoxicity and/or a cytokine release syndrome or risk thereof, following administration of the dose, prior to or unless the subject exhibits a sign or symptom of the toxicity and/or prior to or unless the subject exhibits a sign or symptom of the toxicity other than a fever, optionally wherein the fever is not a sustained fever or the fever is or has been reduced or reduced by more than 1° C. after treatment with an antipyretic; and/or
the administration and any follow-up is carried out on an outpatient basis and/or without admitting the subject to a hospital and/or without an overnight stay at a hospital and/or without requiring admission to or an overnight stay at a hospital, optionally unless or until the subject exhibits a sustained fever or a fever that is or has not been reduced or not reduced by more than 1° C. after treatment with an antipyretic.

39. The method of any of claims 13-38, wherein:
prior to initiation of administration of the dose of cells, the subject has not been administered an anti-IL-6 or anti-IL-6R antibody, optionally tocilizumab or siltuximab, and/or has not been administered a steroid, optionally dexamethasone;
the subject is not administered an anti-IL-6 or anti-IL-6R antibody, optionally tocilizumab or siltuximab, and/or has not been administered a steroid, optionally dexamethasone, within a period of time following administration of the dose, which period of time is optionally at or about 1, 2, 3, 4, 5 days or is optionally at or about 6, 7, 8, 9, 10, 11 days or is optionally 1 or 2 or 3 or 4 weeks; and/or
the subject is not administered an anti-IL-6 or anti-IL-6R antibody, optionally tocilizumab or siltuximab, and/or has not been administered a steroid, optionally dexamethasone, following administration of the cell dose, prior to, or unless, the subject exhibits a sign or symptom of a toxicity, optionally a neurotoxicity or CRS, and/or prior to, or unless, the subject exhibits a sign or symptom of a toxicity, optionally a neurotoxicity or CRS, other than a fever, optionally wherein the fever is not a sustained fever or the fever is or has been reduced or reduced by more than 1° C. after treatment with an antipyretic; and/or
the administration and any follow-up is carried out on an outpatient basis and/or without admitting the subject to a hospital and/or without an overnight stay at a hospital and/or without requiring admission to or an overnight stay at a hospital, optionally unless or until the subject exhibits a sustained fever or a fever that is or has not been reduced or not reduced by more than 1° C. after treatment with an antipyretic.

40. The method of any of claims 13-39, wherein:
the administration is carried out on an outpatient basis and/or without requiring admission to or an overnight stay at a hospital; and
if the subject exhibits a sustained fever or a fever that is or has not been reduced or not reduced by more than 1° C. after treatment with an antipyretic, the subject is admitted to the hospital or to an overnight stay at a hospital and/or is administered an agent or treatment for the treatment or prevention or reduction or attenuation of a neurotoxicity and/or a cytokine release syndrome or risk thereof.

41. The method of any of claims 1-40, wherein the neurotoxicity comprises severe neurotoxicity, optionally at or above grade 4 or grade 5 or at least prolonged grade 3 neurotoxicity.

42. The method of any of claims 1-41, wherein the ALL is adult ALL or pediatric ALL.

43. The method of any of claims 1-42, wherein the sample is or comprises a bone marrow sample, blood sample, plasma sample, or serum sample.

44. The method of any of claims 1-43, wherein the sample is or comprises a bone marrow aspirate.

45. The method of any of claims 1-43, wherein the sample is or comprises a serum or plasma sample.

46. The method of any of claims 1-45, wherein the presence, absence or level of expression of one, two, three, four, five, six, seven, eight, nine, ten or more gene products is assessed or compared.

47. The method of any of claims 1-46, wherein the one or more gene products or portion or fragment thereof is a polynucleotide or a portion thereof.

48. The method of claim 47, wherein the polynucleotide is an RNA.

49. The method of any of claims 1-46, wherein the one or more gene products or portions thereof comprise a protein or a portion thereof.

50. The method of claim 49, wherein the one or more gene products is a gene product from (s) selected from CCL17, ENG, SELE, ICAM3, or IL6R.

51. The method of any of claims 3-50, wherein the gene reference value for the at least one gene product of (a), or each of the gene reference values individually for each of the at least one or more gene product of (a), is a value that:
i) is within 25%, within 20%, within 15%, within 10%, or within 5% above the average level, concentration or amount, and/or is within a standard deviation above the average level, concentration or amount, of the at least one gene product in a plurality of control samples;
ii) is above the highest level, concentration or amount of the at least one gene product, optionally within 50%, within 25%, within 20%, within 15%, within 10%, or within 5% above such highest level, concentration or amount, measured in at least one sample from among a plurality of control samples; and/or
iii) is above the highest level, concentration or amount of the at least one gene product as measured among more than 75%, 80%, 85%, 90%, or 95%, or 98% of samples from a plurality of control samples;
wherein the plurality of control samples are a plurality of biological samples obtained from a group of subjects prior to receiving a immunotherapy for treating ALL, wherein each of the subjects of the group went on to develop severe neurotoxicity, optionally grade 3 or higher, prolonged grade 3 or higher or grade 4 or 5 neurotoxicity, after receiving the immunotherapy for treating the same disease or condition.

52. The method of claim 51, further wherein the gene reference value for the at least one gene product of (a), or each of the gene reference values individually for each of the at least one or more gene product of (a), is:
below the lowest level, concentration, or amount, optionally within 50%, within 25%, within 20%, within 15%, within 10%, or within 5% below the lowest level, concentration or amount, of the at least one gene product observed in a sample from among a second plurality of control samples; and/or
below the level, concentration or amount of the at least one gene product measured as measured in more than 75%, 80%, 85%, 90%, 95%, or 98% of samples from among a second plurality of control samples
wherein the second plurality of control samples is obtained from a group of subjects prior to receiving the same immunotherapy for treating the same disease or condition, wherein each of the subjects of the group did not develop severe neurotoxicity, optionally wherein each of the subjects developed grade 3 or less, grade 2 or less, or grade 1 or 0 neurotoxicity, after receiving the immunotherapy for treating the same disease or condition.

53. The method of any of claims 3-70, wherein the gene reference value for the at least one gene product of (a), or each of the gene reference values individually for each of the at least one or more gene product of (a), is a value that:
i) is within 25%, within 20%, within 15%, within 10%, or within 5% above the average level, concentration or amount, and/or is within a standard deviation above the average level, concentration or amount, of the at least one gene product in a plurality of control samples;
ii) is above the highest level, concentration or amount of the at least one gene product, optionally within 50%, within 25%, within 20%, within 15%, within 10%, or within 5% above such highest level, concentration or amount, as measured in at least one sample from among a plurality of control samples; and/or
iii) is above the highest level, concentration or amount of the at least one gene product measured among more than 75%, 80%, 85%, 90%, 95%, or 98% of samples from a plurality of control samples;
wherein the plurality of control samples are a plurality of biological samples obtained from a group of subjects prior to receiving a immunotherapy for treating ALL, wherein each of the subjects of the group has ALL that is not Philadelphia chromosome positive (Ph+) or Philadelphia-like (Ph-like) subtype of ALL.

54. The method of claim 53, further wherein the gene reference value for the at least one gene product of (a), or each of the gene reference values individually for each of the at least one or more gene product of (a), is:
below the lowest level, concentration, or amount, optionally within 50%, within 25%, within 20%, within 15%, within 10%, or within 5% below the lowest level, concentration or amount, of the at least one gene product observed in a sample from among a second plurality of control samples; and/or
below the level, concentration or amount measured in more than 75%, 80%, 85%, 90%, 95%, or 98% of samples from among a plurality of control samples,
wherein the second plurality of control samples is obtained from a group of subjects prior to receiving the same immunotherapy for treating the same disease or condition, wherein each of the subjects has ALL that is Philadelphia chromosome positive (Ph+) or Philadelphia-like (Ph-like) subtype of ALL.

55. The method of any of claims 3-54, wherein the gene reference value for the at least one gene product of (b), or each of the gene reference values individually for each of the at least one or more gene product of (b), is a value that:
i) is within 25%, within 20%, within 15%, within 10%, or within 5% below the average level, concentration or amount, and/or is within a standard deviation below the average level, concentration or amount, of the at least one gene product in a plurality of control samples;
ii) is below the lowest level, concentration or amount of the at least one gene product, optionally within 50%, within 25%, within 20%, within 15%, within 10%, or within 5% below the lowest level, concentration or amount, as measured in at least one sample from among a plurality of control samples;
iii) is below the lowest level, concentration or amount of the at least one gene product measured among more than 75%, 80%, 85%, 90%, 95%, or 98% of samples from a plurality of control samples;
wherein the plurality of control samples are a plurality of biological samples obtained from a group of subjects prior to receiving a immunotherapy for treating ALL, wherein each of the subjects of the group went on to develop severe neurotoxicity, optionally grade 3 or higher, prolonged grade 3 or higher or grade 4 or 5 neurotoxicity, after receiving the immunotherapy for treating the same disease or condition.

56. The method of claim 55, further wherein the gene reference value for the at least one gene product of (b), or each of the gene reference values individually for each of the at least one or more gene product of (b) is:
above the highest level, concentration, or amount of the at least one gene product, optionally within 50%, within 25%, within 20%, within 15%, within 10%, or within 5% above such level, concentration or amount, measured in at least one sample from among a second plurality of control samples; and/or
above the level, concentration or amount of the at least one gene product measured in more than 75%, 80%, 85%, 90%, 95%, or 98% of samples from among a second plurality of control samples,
wherein the second plurality of control samples are a plurality of control samples obtained from a group of subjects prior to receiving the immunotherapy for treating the disease or condition, wherein each of the subjects of the group did not develop severe neurotoxicity, optionally wherein each of the subjects developed grade 3 or less, grade 2 or less, or grade 1 or 0 neurotoxicity, after receiving the immunotherapy for treating the same disease or condition.

57. The method of any of claims 3-54, wherein the gene reference value for the at least one gene product of (b), or each of the gene reference values individually for each of the at least one or more gene product of (b), is a value that:
i) is within 25%, within 20%, within 15%, within 10%, or within 5% below the average level, concentration or amount, and/or is within a standard deviation below the average level, concentration or amount, of the at least one gene product in a plurality of control samples;
ii) is below the lowest level, concentration or amount of the at least one gene product, optionally within 50%, within 25%, within 20%, within 15%, within 10%, or within 5% below such lowest level, concentration or amount, as measured in at least one sample from among a plurality of control samples;
iii) is below the lowest level, concentration or amount of the at least one gene product measured among more than 75%, 80%, 85%, 90%, 95%, or 98% of samples from a plurality of control samples;
wherein the plurality of control samples are a plurality of biological samples obtained from a group of subjects prior to receiving a immunotherapy for treating ALL, wherein each of the subjects of the group has ALL that is not Philadelphia chromosome positive (PH+) or Philadelphia-like (Ph-like) subtype of ALL.

58. The method of claim 57, further wherein the gene reference value for the at least one gene product of (b), or each of the gene reference values individually for each of the at least one or more gene product of (b) is:
above the highest level, concentration, or amount of the at least one gene product, optionally within 50%, within 25%, within 20%, within 15%, within 10%, or within 5% above such level, concentration or amount, measured in at least one sample from among a second plurality of control samples; and/or
is above the level, concentration or amount of the at least one gene product measured among more than 75%, 80%, 85%, 90%, 95%, or 98% of samples from a second plurality of control samples,
wherein the second plurality of control samples are a plurality of control samples obtained from a group of subjects prior to receiving the immunotherapy for treating the same disease or condition, wherein each of the subjects has ALL that is Philadelphia chromosome positive (Ph+) or Philadelphia-like (Ph-like) subtype of ALL.

59. The method of any of claims 51-58, wherein the control sample or each of the plurality of control samples is the same type of biological sample being assessed from the subject, optionally is a bone marrow sample or aspirate or is a plasma sample.

60. The method of any of claims 51-59, wherein the plurality of control samples comprises at least 3, at least 10, at least 20, at least 50, or at least 100 control samples.

61. A method of assessing a risk of a toxicity or a toxicity-related outcome, following administration of an immunotherapy, the method comprising
(a) assessing the level or amount of one or more proteins or portions thereof in a biological sample from a subject that is a candidate for receiving a immunotherapy for treatment of a disease or condition, wherein the disease or condition is acute lymphoblastic leukemia (ALL) or a subtype thereof, wherein at least one of the one the one or more proteins or portions thereof are selected from CCL17, ENG, SELE, ICAM3, or IL6R; and
(b) comparing the level or amount of the one or more proteins or portions thereof to a reference value, wherein:
the comparison indicates the subject is or is likely at risk of developing neurotoxicity if the at least one of the one or more proteins or portions thereof is at or below the reference value; or
the comparison indicates the subject is not or is likely not at risk of developing neurotoxicity if at least one of the one or more protein or portions thereof is above the reference value.

62. The method of claim 61, wherein the biological sample is a plasma sample.

63. The method of claim 61 or claim 62, wherein at least one of the one or more proteins or portions thereof is CCL17.

64. The method of any of claims 61-63, wherein the immunotherapy is a cell therapy or is a T cell-engaging therapy, optionally wherein the cell therapy comprises cells engineered to express a recombinant receptor.

65. The method of any of claims 61-64, wherein the sample does not comprise the immunotherapy, and/or is obtained from the subject prior to receiving the immunotherapy.

66. The method of any of claims 61-65, wherein the reference value for the one or more protein or portion thereof, or each of the reference values individually for each of the one or more protein or portion thereof, is a value that:
i) is within 25%, within 20%, within 15%, within 10%, or within 5% above the average level, concentration or amount, and/or is within a standard deviation above the average level, concentration or amount, of the one or more protein or portion thereof in a plurality of control samples;
ii) is above the highest level, concentration or amount of the one or more protein or portion thereof, optionally within 50%, within 25%, within 20%, within 15%, within 10%, or within 5% above such highest level, concentration or amount, measured in at least one sample from among a plurality of control samples; and/or
iii) is above the highest level, concentration or amount of the one or more protein or portion thereof as measured among more than 75%, 80%, 85%, 90%, or 95%, or 98% of samples from a plurality of control samples;
wherein the plurality of control samples are a plurality of biological samples obtained from a group of subjects prior to receiving a immunotherapy for treating ALL, wherein (1) each of the subjects of the group went on to develop severe neurotoxicity, optionally grade 3 or higher, prolonged grade 3 or higher or grade 4 or 5 neurotoxicity, after receiving the immunotherapy for treating the same disease or condition; or (2) each of the subjects of the group has ALL that is not Philadelphia chromosome positive (Ph+) or Philadelphia-like (Ph-like) subtype of ALL.

67. The method of claim 66, further wherein the reference value for the one or more protein or portion thereof, or each of the gene reference values individually for each of the one or more protein or portion thereof, is:
below the lowest level, concentration, or amount, optionally within 50%, within 25%, within 20%, within 15%, within 10%, or within 5% below the lowest level, concentration or amount, of the one or more protein or portion thereof observed in a sample from among a second plurality of control samples; and/or
below the level, concentration or amount of the one or more protein or portion thereof as measured in more than 75%, 80%, 85%, 90%, 95%, or 98% of samples from among a second plurality of control samples,
wherein the second plurality of control samples is obtained from a group of subjects prior to receiving the same immunotherapy for treating the ALL, wherein (1) each of the subjects of the group did not develop severe neurotoxicity, optionally wherein each of the subjects developed grade 3 or less, grade 2 or less, or grade 1 or 0 neurotoxicity, after receiving the immunotherapy for treating the same disease or condition, or (2) each of the subjects has ALL that is Philadelphia chromosome positive (Ph+) or Philadelphia-like (Ph-like) subtype of ALL.

68. The method of claim 66 or claim 67, wherein the control sample or each of the plurality of control samples is the same type of biological sample being assessed from the subject, optionally is a plasma sample.

69. The method of any of claims 66-68, wherein the plurality of control samples comprises at least 3, at least 10, at least 20, at least 50, or at least 100 control samples.

70. The method of any of claims 61-69, wherein if the comparison indicates the subject is or is likely to develop neurotoxicity, selecting the subject for administration of a therapeutic regimen, the therapeutic regimen comprising administering to the subject:
i. an agent or other treatment capable of treating, preventing, delaying, reducing or attenuating the development or risk of development of a toxicity and the immunotherapy, wherein administration of the agent is to be administered (i) prior to, (ii) within one, two, or three days of, (iii) concurrently with and/or (iv) at first fever following, the initiation of administration of the immunotherapy to the subject;
ii. the immunotherapy at a reduced dose or at a dose that is not associated with risk of developing toxicity or severe toxicity, or is not associated with a risk of developing a toxicity or severe toxicity in a majority of subjects, and/or a majority of subjects having a disease or condition that the subject has or is suspected of having, following administration of the immunotherapy;
iii. the immunotherapy in an in-patient setting and/or with admission to the hospital for one or more days, optionally wherein the immunotherapy is otherwise to be administered to subjects on an outpatient basis or without admission to the hospital for one or more days; or iv. an alternative therapeutic treatment other than the immunotherapy.

71. The method of any of claims 61-69, wherein if the comparison indicates the subject is not or is likely not at risk of developing neurotoxicity, selecting the subject for administration of a therapeutic regimen, the therapeutic regimen comprising administering to the subject:
i. the immunotherapy, optionally at a non-reduced dose, optionally on an outpatient basis or without admission to the hospital for one or more days;
ii. the immunotherapy, wherein administration of the immunotherapy does not comprise administering, prior to or concurrently with administering the immunotherapy and/or prior to the development of a sign or symptom of toxicity other than fever, an agent or treatment capable of treating, preventing, delaying, or attenuating the development of the toxicity; or
iii. the immunotherapy in an outpatient setting and/or without admission of the subject to the hospital overnight or for one or more consecutive days and/or is without admission of the subject to the hospital for one or more days.

72. The method of any of claims 61-71, further comprising administering the therapeutic regimen to the selected subject.

73. A method of assessing a risk of a toxicity or a toxicity-related outcome, following administration of an immunotherapy, the method comprising
(a) assessing the level or amount of one or more proteins or portions thereof in a biological sample from a subject that received an immunotherapy for treatment of a disease or condition, wherein:
at least one of the one the one or more proteins or portions thereof are selected from CCL27, ENG, FAS, 1-309, ICAM3, NSE, P-Selectin, Resistin, S100(3, Thrombomodulin or vWF; and
(b) comparing the level or amount of the one or more proteins or portions thereof to a reference value, wherein:
the comparison indicates the subject is or is likely at risk of developing neurotoxicity if the at least one of the one or more proteins or portions thereof is at or below the reference value; or
the comparison indicates the subject is not or is likely not at risk of developing neurotoxicity if at least one of the one or more protein or portions thereof is above the reference value.

74. The method of claim 73, wherein the biological sample is a plasma sample.

75. The method of claim 73 or claim 74, wherein the biological sample is obtained or collected from the subject no more than 4 days, no more than 3 days, no more than 2 days or no more than 1 day, after initiation of administration of the immunotherapy and/or before the subject exhibits a sign or symptom of the toxicity and/or before the subjects develops a sustained fever.

76. The method of any of claims 73-75, wherein at least one of the one or more proteins or portions thereof is ENG or ICAM3.

77. The method of any of claims 73-76, wherein the immunotherapy is a cell therapy or is a T cell-engaging therapy, optionally wherein the cell therapy comprises cells engineered to express a recombinant receptor.

78. The method of any of claims 73-77, wherein the reference value for the one or more protein or portion thereof, or each of the reference values individually for each of the one or more protein or portion thereof, is a value that:
i) is within 25%, within 20%, within 15%, within 10%, or within 5% above the average level, concentration or amount, and/or is within a standard deviation above the average level, concentration or amount, of the one or more protein or portion thereof in a plurality of control samples;
ii) is above the highest level, concentration or amount of the one or more protein or portion thereof, optionally within 50%, within 25%, within 20%, within 15%, within 10%, or within 5% above such highest level, concentration or amount, measured in at least one sample from among a plurality of control samples; and/or
iii) is above the highest level, concentration or amount of the one or more protein or portion thereof as measured among more than 75%, 80%, 85%, 90%, or 95%, or 98% of samples from a plurality of control samples;
wherein the plurality of control samples are a plurality of biological samples obtained from a group of subjects after receiving a immunotherapy for treating ALL, wherein (1) each of the subjects of the group went on to develop severe neurotoxicity, optionally grade 3 or higher, prolonged grade 3 or higher or grade 4 or 5 neurotoxicity, after receiving the immunotherapy for treating the same disease or condition; or (2) each of the subjects of the group has ALL that is not Philadelphia chromosome positive (Ph+) or Philadelphia-like (Ph-like) subtype of ALL.

79. The method of claim 78, further wherein the reference value for the one or more protein or portion thereof, or each of the gene reference values individually for each of the one or more protein or portion thereof, is:
below the lowest level, concentration, or amount, optionally within 50%, within 25%, within 20%, within 15%, within 10%, or within 5% below the lowest level, concentration or amount, of the one or more protein or portion thereof observed in a sample from among a second plurality of control samples; and/or
below the level, concentration or amount of the one or more protein or portion thereof as measured in more than 75%, 80%, 85%, 90%, 95%, or 98% of samples from among a second plurality of control samples,
wherein the second plurality of control samples is obtained from a group of subjects after receiving the same immunotherapy for treating the ALL, wherein (1) each of the subjects of the group did not develop severe neurotoxicity, optionally wherein each of the subjects developed grade 3 or less, grade 2 or less, or grade 1 or 0 neurotoxicity, after receiving the immunotherapy for treating the same disease or condition, or (2) each of the subjects has ALL that is Philadelphia chromosome positive (Ph+) or Philadelphia-like (Ph-like) subtype of ALL.

80. The method of claim 78 or claim 79, wherein the control sample or each of the plurality of control samples is the same type of biological sample being assessed from the subject, optionally is a plasma sample.

81. The method of any of claims 78-80, wherein the control sample or each of the plurality of control samples had been obtained or collected from the subject no more than 4 days, no more than 3 days, no more than 2 days or no more than 1 day, after initiation of administration of the immunotherapy and/or before the subject exhibits a sign or symptom of the toxicity and/or before the subjects develops a sustained fever.

82. The method of any of claims 78-81, wherein the plurality of control samples comprises at least 3, at least 10, at least 20, at least 50, or at least 100 control samples.

83. The method of any of claims 73-83, wherein if the comparison indicates the subject is or is likely to develop neurotoxicity, administering to the subject an agent or other treatment capable of treating, preventing, delaying, reducing or attenuating the development or risk of development of a toxicity and the immunotherapy.

84. The method of claim 83, wherein administration of the agent is to be administered within one, two, or three days of and/or at first fever following, the initiation of administration of the immunotherapy to the subject.

85. The method of any of claims 1-88, wherein the immunotherapy specifically binds to an antigen associated with the disease or condition or expressed in cells of the environment of a lesion associated with the disease or condition.

86. The method of claim 85, wherein the antigen is CD19, CD20, CD22 or CD123.

87. The method of any of claim 1-86, wherein the immunotherapy is a T cell-engaging therapy comprising a bispecific antibody, wherein at least one binding portion specifically binds to a T cell antigen and a second binding portion binds to the antigen associated with the disease or condition or expressed in cells of the environment of a lesion associated with the disease or condition.

88. The method of claim 87, wherein the T cell antigen is CD3.

89. The method of claim 87 or 88, wherein the second binding portion binds CD19.

90. The method of any of claims 87-89, wherein the bispecific antibody is blinatumomab.

91. The method of any of claims 1-86, wherein the immunotherapy is a cell therapy, wherein the cell therapy comprises genetically engineered cells expressing a recombinant receptor.

92. The method of claim 91, wherein the genetically engineered cells comprise T cells or NK cells.

93. The method of claim 91 or claim 92, wherein the engineered cells comprise T cells.

94. The method of any of claims 1-86 and 91-93, wherein the immunotherapy is a T cell therapy comprising genetically engineered T cells expressing a recombinant receptor.

95. The method of claim 94, wherein the T cells comprise CD4+ and/or CD8+ T cells

96. The method of any of claims 91-95, wherein the recombinant receptor is a T cell receptor or a functional non-T cell receptor.

97. The method of any of claims 91-96, wherein the recombinant receptor is a chimeric antigen receptor (CAR).

98. The method of any of claims 91-97, wherein the recombinant receptor is an anti-CD19 CAR.

99. The method of claim 97 or 98, wherein the CAR comprises an extracellular antigen-recognition domain that specifically binds to the antigen and an intracellular signaling domain comprising an ITAM, wherein optionally, the intracellular signaling domain comprises an intracellular domain of a CD3-zeta (CDζ) chain; and/or wherein the CAR further comprises a costimulatory signaling region, which optionally comprises a signaling domain of CD28 or 4-1BB.

100. The method of any of claims 91-99, wherein the risk or likely risk of the subject developing neurotoxicity following administration of the cell therapy is further based on the value of a parameter that indicates or correlates with the degree of recombinant receptor-dependent, optionally CAR-dependent, activity of the composition, wherein if the value of the parameter is at or greater than a threshold value the subject is at risk of developing neurotoxicity following administration of the immunotherapy when administered to the subject.

101. The method of claim 100, wherein the recombinant receptor-dependent activity comprises a measure of the production or accumulation of one or more of a proinflammatory cytokine, or a normalized value thereof.

102. The method of claim 101, wherein the proinflammatory cytokine is TNF-alpha, IFN-gamma, IL-2, IL-10, or a combination thereof.

103. The method of any of claims 91-103, wherein the immunotherapy comprises the administration of from or from about 1×10⁵ to 1×10⁸ total recombinant receptor-expressing cells, total T cells, or total peripheral blood mononuclear cells (PBMCs), from or from about 5×10⁵ to 1×10⁷ total recombinant receptor-expressing cells, total T cells, or total peripheral blood mononuclear cells (PBMCs) or from or from about 1×10⁶ to 1×10⁷ total recombinant receptor-expressing cells, total T cells, or total peripheral blood mononuclear cells (PBMCs), each inclusive.

104. The method of claim 19 or claim 70, wherein the immunotherapy is a cell therapy, said cell therapy comprising genetically engineered cells expressing a recombinant receptor, and the subject is administered a dose that is from or from about 2×10⁶ to 5×10⁷ total recombinant receptor-expressing cells, inclusive, or that is from or from about 2×10⁵ cells/kg to 5×10⁵ cells/kg total recombinant receptor-expressing cells, inclusive.

105. The method of claim 20 or claim 71, wherein the immunotherapy is a cell therapy, said cell therapy comprising genetically engineered cells expressing a recombinant receptor, and the subject is administered a dose that is from or from about 1×10⁷ to 2.0×10⁸ total recombinant receptor-expressing cells, inclusive, or that is from or from about 1×10⁶ cells/kg to 2×10⁶ cells/kg total recombinant receptor-expressing cells, inclusive.

106. The method of claim 23-30, wherein the immunotherapy is a cell therapy, said cell therapy comprising genetically engineered cells expressing a recombinant receptor, and the subject is administered a dose that is from or from about 1×10⁷ to 2.0×10⁸ total recombinant receptor-expressing cells, inclusive, or the subject is administered a dose that is from or from about 1×10⁶ cells/kg to 2×10⁶ cells/kg total recombinant receptor-expressing cells, inclusive.

107. The method of any of claims 1-106, wherein the subject is an adult human subject.

108. The method of any of claims 1-106, wherein the subject is a pediatric human subject.

109. A kit, comprising reagents for detecting the expression of two or more gene products or portions thereof in a sample, wherein the two or more gene products are encoded by two or more of CCL17, ABCA9, ADAMTSL4, ADGRA2, ADGRF1, AKS, APOL1, ARHGAP27, ARID3B, CA6, CABP7, CCDC152, CCR1, CCR6, CEP85L, CISH, CR2, ENAM, ENPP2, EPHA4, FTH1P11, FTH1P2, FTH1P8, GADD45A, GAS6, GBP3, GBP5, GBP6, GIMAP1-GIMAPS, GLI2, GPA33, GPRIN3, HSPA1A, IFITM1, IFITM3, IL15, IL2RA, JCHAIN, KIAA1257, LA16c-390H2.4, LAMB1, LDB3, LINC00623, LST1, LTB, LY6E, MAS1, MUC4, NLRC3, PLXNA4, PON2, PTGES3P1, PTP4A3, RNU1-1, RP11-345J4.6, RP11-421N8.1, RP11-51J9.5, RP11-51O6.1, RP11-552F3.9, RP11-686D22.9, RP11-723D22.3, RP11-723O4.6, RP13-512J5.1, RP4-620F22.2, RP5-940J5.9, RP6-109B7.5, RPL21P75, RYR2, SAMD9L, SEMA6A, SLC37A3, SNRPEP4, SOCS1, SPATS2L, SPON1, SV2C, TMEM154, TP53INP1, TNF, TRIM47, UST, WNT9A, ASAP2, ATP8B1, ATP9A, CCNA1, CDHR3, CECR2, CELF4, DLX1, DPYSL3, EHD4, FMNL2, GGA2, GPR176, HHIPL1, HOXA7, HMX3, IGF2BP1, IL3RA, IRX3, IRX5, KCNIP1, KIAA1644, LINC00092, LINC01483, MDFI, MIB1, MMP14, NOM1, OTOA, PCDHGA12, PCDHGA4, PCDHGA6, PCDHGB1, PCDHGB5, PCDHGB6, PINLYP, PPM1E, PRKD1, PROKR2, PRSS12, PRTG, PTCH1, RFX8, RP11-146B14.1, RP11-3P17.5, RP11-41O4.1, RP11-713N11.4, RP4-568B10.1, SERF1A, SEZ6L, SMURF1, TBC1D30, TCF12, TCP11, TM9SF3, TMPRSS15, TMSB15A, TNKS1BP1, TREM2, TTC28, ZNF415, ENG, SELE, ICAM3, PCDHGA9, FMNL1, or IL6R, or a portion or a fragment of any of the forgoing.

110. The kit of claim 109, wherein the two or more gene products are human gene products.

111. The kit of claim 109 or 110, wherein the kit comprises reagents for detecting the expression of at least 3, at least 4, at least 5, at least 6, at least 7, at least 8, at least 9, at least 10, at least 11, at least 12, at least 13, at least 14, at least 15, at least 20, at least 25, at least 30, at least 40, or at least 50 gene products.

112. The kit of any of claims 109-111, wherein at least one of the two or more gene products is from a first group of gene products that negatively correlate to a risk of developing neurotoxicity, wherein the first group comprises gene products encoded by CCL17, ABCA9, ADAMTSL4, ADGRA2, ADGRF1, AK5, APOL1, ARHGAP27, ARID3B, CA6, CABP7, CCDC152, CCL17, CCR1, CCR6, CEP85L, CISH, CR2, ENAM, ENPP2, EPHA4, FTH1P11, FTH1P2, FTH1P8, GADD45A, GAS6, GBP3, GBP5, GBP6, GIMAP1-GIMAPS, GLI2, GPA33, GPRIN3, HSPA1A, IFITM1, IFITM3, IL15, IL2RA, JCHAIN, KIAA1257, LA16c-390H2.4, LAMB1, LDB3, LINC00623, LST1, LTB, LY6E, MAS1, MUC4, NLRC3, PLXNA4, PON2, PTGES3P1, PTP4A3, RNU1-1, RP11-345J4.6, RP11-421N8.1, RP11-51J9.5, RP11-51O6.1, RP11-552F3.9, RP11-686D22.9, RP11-723D22.3, RP11-723O4.6, RP13-512J5.1, RP4-620F22.2, RP5-940J5.9, RP6-109B7.5, RPL21P75, RYR2, SAMD9L, SEMA6A, SLC37A3, SNRPEP4, SOCS1, SPATS2L, SPON1, SV2C, TMEM154, TP53INP1, TNF, TRIM47, UST, WNT9A, ENG, SELE, ICAM3, or IL6R, and portions or a fragments of any of the forgoing.

113. The kit of any of claims 109-112, wherein at least one of the two or more gene products is a gene product encoded by ADGRF1, CA6, CCL17, CCR6, ENAM, GAS6, GBP5, GLI2, IFITM1, JCHAIN, MUC4, PON2, PTP4A3, SEMA6A, SLC37A3, SPATS2L, TMEM154, TP53INP1, IL2RA, or WNT9A, or is a portion or a fragment of any of the forgoing.

114. The kit of any of claims 109-113, wherein at least one of the two or more gene products is a gene product encoded by JCHAIN, MUC4, CA6, WNT9A, ADGRF1 or CCL17, or a portion or fragment of any of the foregoing.

115. The kit of any of claims 109-112, wherein at least one of the two or more gene products is a gene product encoded by CCL17, ENG, SELE, ICAM3, or IL6R, and portions or a fragments of any of the forgoing.

116. The kit of any of claims 109-115, wherein at least one of the two or more gene products is a gene product encoded by CCL17 or is a portion or fragment thereof.

117. The kit of any of claims 109-116, wherein at least one of the two or more gene products is from a second group of gene products that positively correlate to a risk of developing neurotoxicity, wherein the second group comprises gene products encoded by ASAP2, ATP8B1, ATP9A, CCNA1, CDHR3, CECR2, CELF4, DLX1, DPYSL3, EHD4, FMNL2, GGA2, GPR176, HHIPL1, HOXA7, HMX3, IGF2BP1, IL3RA, IRX3, IRX5, KCNIP1, KIAA1644, LINC00092, LINC01483, MDFI, MIB1, MMP14, NOM1, OTOA, PCDHGA12, PCDHGA4, PCDHGA6, PCDHGB1, PCDHGBS, PCDHGB6, PINLYP, PPM1E, PRKD1, PROKR2, PRSS12, PRTG, PTCH1, RFX8, RP11-146B14.1, RP11-3P17.5, RP11-41O4.1, RP11-713N11.4, RP4-568B10.1, SERF1A, SEZ6L, SMURF1, TBC1D30, TCF12, TCP11, TM9SF3, TMPRSS15, TMSB15A, TNKS1BP1, TREM2, TTC28, PCDHGA9, FMNL1, and ZNF415, or portions or a fragments of any of the forgoing.

118. The kit of any of claims 109-117, wherein at least one of the two or more gene products is a gene product encoded by ASAP2, FMNL2, GPR176, MDFI, PCDHGA12, PCDHGA6, PCDHGBS, PCDHGB6, PINLYP, PTCH1, ATP9A, HMX3, DPYSL3, ZNF415, IRX5, TMPRSS15, IL3RA, IGF2BP1, or TTC28, or is a portion or fragment of any of the foregoing.

119. The kit of any of claims 109-118, wherein at least one of the two or more gene products is a gene product encoded by PINLYP, ASAP2, FMNL2, PTCH1, TTC28, PCDHGA6, PCDHGB6 or PCDHGA12, or a portion or fragment of any of the foregoing.

120. The kit of any of claims 109-119, wherein at least one of the two or more gene products is a gene product encoded by PINLYP or PCDHGA12, or a portion or fragment of any of the foregoing.

121. The kit of any of claims 109-119 wherein:
at least one of the two or more gene products is a gene product, or a portion or fragment thereof, from a first group of gene products that negatively correlate to a risk of developing neurotoxicity selected from CCL17, ABCA9, ADAMTSL4, ADGRA2, ADGRF1, AKS, APOL1, ARHGAP27, ARID3B, CA6, CABP7, CCDC152, CCL17, CCR1, CCR6, CEP85L, CISH, CR2, ENAM, ENPP2, EPHA4, FTH1P11, FTH1P2, FTH1P8, GADD45A, GAS6, GBP3, GBP5, GBP6, GIMAP1-GIMAPS, GLI2, GPA33, GPRIN3, HSPA1A, IFITM1, IFITM3, IL15, IL2RA, JCHAIN, KIAA1257, LA16c-390H2.4, LAMB1, LDB3, LINC00623, LST1, LTB, LY6E, MAS1, MUC4, NLRC3, PLXNA4, PON2, PTGES3P1, PTP4A3, RNU1-1, RP11-345J4.6, RP11-421N8.1, RP11-51J9.5, RP11-51O6.1, RP11-552F3.9, RP11-686D22.9, RP11-723D22.3, RP11-723O4.6, RP13-512J5.1, RP4-620F22.2, RP5-940J5.9, RP6-109B7.5, RPL21P75, RYR2, SAMD9L, SEMA6A, SLC37A3, SNRPEP4, SOCS1, SPATS2L, SPON1, SV2C, TMEM154, TP53INP1, TNF, TRIM47, UST, WNT9A, ENG, SELE, ICAM3, or IL6R, and portions or a fragments of any of the forgoing; and
at least one of the gene products is a gene product, or a portion or fragment thereof, from a second group of gene products that positively correlate to a risk of developing neurotoxicity selected from ASAP2, ATP8B1, ATP9A, CCNA1, CDHR3, CECR2, CELF4, DLX1, DPYSL3, EHD4, FMNL2, GGA2, GPR176, HHIPL1, HOXA7, HMX3, IGF2BP1, IL3RA, IRX3, IRX5, KCNIP1, KIAA1644, LINC00092, LINC01483, MDFI, MIB1, MMP14, NOM1, OTOA, PCDHGA12, PCDHGA4, PCDHGA6, PCDHGB1, PCDHGBS, PCDHGB6, PINLYP, PPM1E, PRKD1, PROKR2, PRSS12, PRTG, PTCH1, RFX8, RP11-146B14.1, RP11-3P17.5, RP11-41O4.1, RP11-713N11.4, RP4-568B10.1, SERF1A, SEZ6L, SMURF1, TBC1D30, TCF12, TCP11, TM9SF3, TMPRSS15, TMSB15A, TNKS1BP1, TREM2, TTC28, PCDHGA9, FMNL1, and ZNF415, or portions or a fragments of any of the forgoing.

122. The kit of claim 121, wherein the at least one of the gene products from the first group is a gene product encoded by ADGRF1, CA6, CCL17, CCR6, ENAM, GAS6, GBP5, GLI2, IFITM1, JCHAIN, MUC4, PON2, PTP4A3, SEMA6A, SLC37A3, SPATS2L, TMEM154, TP53INP1, IL2RA, or WNT9A, or is a portion or a fragment of any of the forgoing;
and wherein the at least one of the gene products from the second group is a gene product encoded by ASAP2, FMNL2, GPR176, MDFI, PCDHGA12, PCDHGA6, PCDHGBS, PCDHGB6, PINLYP, PTCH1, ATP9A, HMX3, DPYSL3, ZNF415, IRX5, TMPRSS15, IL3RA, IGF2BP1, or TTC28, or is a portion or fragment of any of the foregoing.

123. The kit of claim 121 or 122, wherein the at least one of the gene products from the first group is a gene product encoded by JCHAIN, MUC4, CA6, WNT9A, ADGRF1 or CCL17, or a portion or fragment of any of the foregoing; and
wherein the at least one of the gene products from the second group is a gene product encoded by PINLYP, ASAP2, FMNL2, PTCH1, TTC28, PCDHGA6, PCDHGB6 or PCDHGA12, or a portion or fragment of any of the foregoing.

124. The kit of any of claims 121-123, wherein:
the at least one of the gene products from the first group is a gene product encoded by CCL17 or is a portion or fragment thereof; and
the at least one of the gene products from the second group is a gene product encoded by PINLYP or PCDHGA12, or a portion or fragment thereof.

125. The kit of any of claims 109-124, wherein the two or more gene products are or comprise mRNA.

126. The kit of claim 125, wherein the reagents comprise one or more oligonucleotide and/or polynucleotide probes that are to, bind to, and/or are capable of binding to the one or more mRNA gene products.

127. The kit of any of claims 109-124, wherein the two or more gene products are or comprise proteins or variants or fragments thereof.

128. The kit of claim 127, wherein the two or more gene products are selected from CCL17, ENG, SELE, ICAM3, or IL6R, and portions or a fragments of any of the forgoing.

129. The kit of claim 128, wherein the reagents are or comprise antibodies or antigen binding fragments or variants thereof, wherein the antibodies or the antigen binding fragments or variants thereof bind to and/or are capable of binding to the protein gene products.

130. The kit of any of claims 109-129, further comprising an immunotherapy.

131. The kit of claim 130, wherein the immunotherapy is a cell therapy or is a T cell-engaging therapy, optionally wherein the cell therapy comprises cells engineered to express a recombinant receptor.

132. The kit of any of claims 109-131, for use in connection the method of any of claims 1-108.

133. An article of manufacture, comprising a kit of any one of claims 109-134, and instructions for using the reagents to assay a biological sample from a subject that is a candidate for treatment, optionally with an immunotherapy.

134. The article of manufacture of claims 133, wherein the instructions specify carrying out the method of any of claims 1-108.

135. An article of manufacture comprising an immunotherapy and instructions for administering the immunotherapy to a subject that exhibits a Philadelphia chromosome (Ph+) and/or Ph chromosome-like (Ph-like) molecular subtype of acute lymphoblastic leukemia (ALL).

136. The article of manufacture of claim 135, wherein the immunotherapy is a immunotherapy or is a T cell-engaging therapy, optionally wherein the immunotherapy comprises cells engineered to express a recombinant receptor.

The application's sequence listing, which the Patent Office published only in electronic form, follows.

SEQUENCE LISTING (203 sequences)

SEQ ID NO: 1 - DNA, 1378 bp, Homo sapiens
  misc_feature: carbonic anhydrase 6 (isoform 1)
ctttaaaagaagagcttcgccggaatcagtcttcattacagatgtgcagcaccatgagggccctggtgcttctgctgtccctgttcctgctgggtggccaggcccagcatgtgtctgactggacctactcagaaggggcactggacgaagcgcactggccacagcactaccccgcctgtgggggccagagacagtcgcctatcaacctacagaggacgaaggtgcggtacaacccctccttgaaggggctcaatatgacaggctatgagacccaggcaggggagttccccatggtcaacaatggccacacagtgcagatcagcctgccctccaccatgcgcatgacagtggctgacggcactgtatacatagcccagcagatgcactttcactggggaggtgcgtcctcggagatcagcggctctgagcacaccgtggacgggatcagacatgtgatcgagattcacattgttcactacaattctaaatacaagagctatgatatagcccaagatgcgccggatggtttggctgtactggcagccttcgttgaggtgaagaattaccctgaaaacacttattacagcaacttcatttctcatctggccaacatcaagtacccaggacaaagaacaaccctgactggccttgacgttcaggacatgctgcccaggaacctccagcactactacacctaccatggctcactcaccacgcctccctgcactgagaacgtccactggtttgtgctggcagattttgtcaagctctccaggacacaggtttggaagctggagaattccttactggatcaccgcaacaagaccatccacaacgattaccgcaggacccagcccctgaaccacagagtggtggaatccaacttcccgaatcaggaatacactctaggctctgaattccagttttacctacataagattgaggaaattcttgactacttaagaagagcattgaactgaggaaagctaagaggaagattcaatattaactagcttgaagcctgacctagccagaagtgcctgtccgctgcagccgcaccctaccttgtctaagaaaccatgtgtgtctggaacacgctgctccccctggggcagctgttgggattctgattaaaagaggggaaacgatcatcctggacaggaagtgagatggcttcagttcatgagacgggatctgagttagacatcaccagtggaaattgattggaatagaaacttaaaggaaatggaaccctaactattctcccatcaaatcatatatgttgacctgtctgaattataaaccagcctgacctttcctttagcattagatgtaataaaataactttggaaatttgtcatttaaaaaaaaaaaaaaa

SEQ ID NO: 2 - DNA, 995 bp, Homo sapiens
  misc_feature: carbonic anhydrase 6 (isoform 2)
ctttaaaagaagagcttcgccggaatcagtcttcattacagatgtgcagcaccatgagggccctggtgcttctgctgtccctgttcctgctgggtggccaggcccagcatgtgtctgactggacctactcagaaggggcactggacgaagcgcactggccacagcactaccccgcctgtgggggccagagacagtcgcctatcaacctacagaggacgaaggtgcggtacaacccctccttgaaggggctcaatatgacaggctatgagacccaggcaggggagttccccatggtcaacaatggccacacagtgcagatcagcctgccctccaccatgcgcatgacagtggctgacggcactgtatacatagcccagcagatgcactttcactggggaggtgcgtcctcggagatcagcggctctgagcacaccgtggacgggatcagacatgtgatcgagattcacattgttcactacaattctaaatacaagagctatgatatagcccaagatgcgccggatggtttggctgtactggcagccttcgttgaggtgaagaattaccctgaaaacacttattacagcaacttcatttctcatctggccaacatcaagtacccaggacaaagaacaaccctgactggccttgacgttcaggacatgctgcccaggaacctccagcactactacacctaccatggctcactcaccacgcctccctgcactgagaacgtccactggtttgtgctggcagattttgtcaagctctccaggacacaggtttggaagctggagaattccttactggatcaccgcaacaagaccatccacaacgattaccgcaggacccagcccctgaaccacagagtggtggaatccaacttcccgaatcagggcaagggccacggggggcatcgtgggagaagccaaaatccaagagtacagcccacctcaacacgccaccccttggctctgggcagcttagaagcctga

SEQ ID NO: 3 - DNA, 1198 bp, Homo sapiens
  misc_feature: carbonic anhydrase 6 (isoform 3)
ctttaaaagaagagcttcgccggaatcagtcttcattacagatgtgcagcaccatgagggccctggtgcttctgctgtccctgttcctgctgggtggccaggcccagcatgtgtctgactggacctactcagtgcagatcagcctgccctccaccatgcgcatgacagtggctgacggcactgtatacatagcccagcagatgcactttcactggggaggtgcgtcctcggagatcagcggctctgagcacaccgtggacgggatcagacatgtgatcgagattcacattgttcactacaattctaaatacaagagctatgatatagcccaagatgcgccggatggtttggctgtactggcagccttcgttgaggtgaagaattaccctgaaaacacttattacagcaacttcatttctcatctggccaacatcaagtacccaggacaaagaacaaccctgactggccttgacgttcaggacatgctgcccaggaacctccagcactactacacctaccatggctcactcaccacgcctccctgcactgagaacgtccactggtttgtgctggcagattttgtcaagctctccaggacacaggtttggaagctggagaattccttactggatcaccgcaacaagaccatccacaacgattaccgcaggacccagcccctgaaccacagagtggtggaatccaacttcccgaatcaggaatacactctaggctctgaattccagttttacctacataagattgaggaaattcttgactacttaagaagagcattgaactgaggaaagctaagaggaagattcaatattaactagcttgaagcctgacctagccagaagtgcctgtccgctgcagccgcaccctaccttgtctaagaaaccatgtgtgtctggaacacgctgctccccctggggcagctgttgggattctgattaaaagaggggaaacgatcatcctggacaggaagtgagatggcttcagttcatgagacgggatctgagttagacatcaccagtggaaattgattggaatagaaacttaaaggaaatggaaccctaactattctcccatcaaatcatatatgttgacctgtctgaattataaaccagcctgacctttcctttagcattagatgtaataaaataactttggaaatttgtcatttaaaaaaaaaaaaaaa

SEQ ID NO: 4 - DNA, 1049 bp, Homo sapiens
  misc_feature: carbonic anhydrase 6 (isoform 4)
ctttaaaagaagagcttcgccggaatcagtcttcattacagatgtgcagcaccatgagggccctggtgcttctgctgtccctgttcctgctgggtggccaggcccagcatgtgtctgactggacctactcagattcacattgttcactacaattctaaatacaagagctatgatatagcccaagatgcgccggatggtttggctgtactggcagccttcgttgaggtgaagaattaccctgaaaacacttattacagcaacttcatttctcatctggccaacatcaagtacccaggacaaagaacaaccctgactggccttgacgttcaggacatgctgcccaggaacctccagcactactacacctaccatggctcactcaccacgcctccctgcactgagaacgtccactggtttgtgctggcagattttgtcaagctctccaggacacaggtttggaagctggagaattccttactggatcaccgcaacaagaccatccacaacgattaccgcaggacccagcccctgaaccacagagtggtggaatccaacttcccgaatcaggaatacactctaggctctgaattccagttttacctacataagattgaggaaattcttgactacttaagaagagcattgaactgaggaaagctaagaggaagattcaatattaactagcttgaagcctgacctagccagaagtgcctgtccgctgcagccgcaccctaccttgtctaagaaaccatgtgtgtctggaacacgctgctccccctggggcagctgttgggattctgattaaaagaggggaaacgatcatcctggacaggaagtgagatggcttcagttcatgagacgggatctgagttagacatcaccagtggaaattgattggaatagaaacttaaaggaaatggaaccctaactattctcccatcaaatcatatatgttgacctgtctgaattataaaccagcctgacctttcctttagcattagatgtaataaaataactttggaaatttgtcatttaaaaaaaaaaaaaaa

SEQ ID NO: 5 - DNA, 615 bp, Homo sapiens
  misc_feature: C-C motif chemokine ligand 17
gctcagagagaagtgactttgagctcacagtgtcaccgcctgctgatgggagagctgaattcaaaaccagggtgtctccctgagcagagggacctgcacacagagactccctcctgggctcctggcaccatggccccactgaagatgctggccctggtcaccctcctcctgggggcttctctgcagcacatccacgcagctcgagggaccaatgtgggccgggagtgctgcctggagtacttcaagggagccattccccttagaaagctgaagacgtggtaccagacatctgaggactgctccagggatgccatcgtttttgtaactgtgcagggcagggccatctgttcggaccccaacaacaagagagtgaagaatgcagttaaatacctgcaaagccttgagaggtcttgaagcctcctcaccccagactcctgactgtctcccgggactacctgggacctccaccgttggtgttcaccgcccccaccctgagcgcctgggtccaggggaggccttccagggacgaagaagagccacagtgagggagatcccatccccttgtctgaactggagccatgggcacaaagggcccagattaaagtctttatcctc

SEQ ID NO: 6 - DNA, 3216 bp, Homo sapiens
  misc_feature: C-C motif chemokine receptor 6
agtgtatgggtgaaggaggcagcagtgtggccggagaggagagctgggctgggagcacaggaaggtccccaggactctgtggtcatcagtaagagagggcccacgtgtatatgctggtgaacagaaatgtcaaccttttcaaagtctgacatttaagagaaaaaactgtggctgttggtttgtggaacagacagctccttctttattgagtcacctctactttcctgctaccgctgcctgtgagctgaaggggctgaaccatacactcctttttctacaaccagcttgcattttttctgcccacaatgagcggggaatcaatgaatttcagcgatgttttcgactccagtgaagattattttgtgtcagtcaatacttcatattactcagttgattctgagatgttactgtgctccttgcaggaggtcaggcagttctccaggctatttgtaccgattgcctactccttgatctgtgtctttggcctcctggggaatattctggtggtgatcacctttgctttttataagaaggccaggtctatgacagacgtctatctcttgaacatggccattgcagacatcctctttgttcttactctcccattctgggcagtgagtcatgccaccggtgcgtgggttttcagcaatgccacgtgcaagttgctaaaaggcatctatgccatcaactttaactgcgggatgctgctcctgacttgcattagcatggaccggtacatcgccattgtacaggcgactaagtcattccggctccgatccagaacactaccgcgcagcaaaatcatctgccttgttgtgtgggggctgtcagtcatcatctccagctcaacttttgtcttcaaccaaaaatacaacacccaaggcagcgatgtctgtgaacccaagtaccagactgtctcggagcccatcaggtggaagctgctgatgttggggcttgagctactctttggtttctttatccctttgatgttcatgatattttgttacacgttcattgtcaaaaccttggtgcaagctcagaattctaaaaggcacaaagccatccgtgtaatcatagctgtggtgcttgtgtttctggcttgtcagattcctcataacatggtcctgcttgtgacggctgcaaatttgggtaaaatgaaccgatcctgccagagcgaaaagctaattggctatacgaaaactgtcacagaagtcctggctttcctgcactgctgcctgaaccctgtgctctacgcttttattgggcagaagttcagaaactactttctgaagatcttgaaggacctgtggtgtgtgagaaggaagtacaagtcctcaggcttctcctgtgccgggaggtactcagaaaacatttctcggcagaccagtgagaccgcagataacgacaatgcgtcgtccttcactatgtgatagaaagctgagtctccctaaggcatgtgtgaaacatactcatagatgttatgcaaaaaaaagtctatggccaggtatgcatggaaaatgtgggaattaagcaaaatcaagcaagcctctctcctgcgggacttaacgtgctcatgggctgtgtgatctcttcagggtggggtggtctctgataggtagcattttccagcactttgcaaggaatgttttgtagctctagggtatatatccgcctggcatttcacaaaacagcctttgggaaatgctgaattaaagtgaattgttgacaaatgtaaacattttcagaaatattcatgaagcggtcacagatcacagtgtcttttggttacagcacaaaatgatggcagtggtttgaaaaactaaaacagaaaaaaaaatggaagccaacacatcactcattttaggcaaatgtttaaacatttttatctatcagaatgtttattgttgctggttataagcagcaggattggccggctagtgtttcctctcatttccctttgatacagtcaacaagcctgaccctgtaaaatggaggtggaaagacaagctcaagtgttcacaacctggaagtgcttcgggaagaaggggacaatggcagaacaggtgttggtgacaattgtcaccaattggataaagcagctcaggttgtagtgggccattaggaaactgtcggtttgctttgatttccctgggagctgttctctgtcgtgagtgtctcttgtctaaacgtccattaagctgagagtgctatgaagacaggatctagaataatcttgctcacagctgtgctctgagtgcctagcggagttccagcaaacaaaatggactcaagagagatttgattaatgaatcgtaatgaagttggggtttattgtacagtttaaaatgttagatgtttttaattttttaaataaatggaatactttttttttttttttaaagaaagcaactttactgagacaatgtagaaagaagttttgttccgtttctttaatgtggttgaagagcaatgtgtggctgaagacttttgttatgaggagctgcagattagctaggggacagctggaattatgctggcttctgataattattttaaaggggtctgaaatttgtgatggaatcagattttaacagctctcttcaatgacatagaaagttcatggaactcatgtttttaaagggctatgtaaatatatgaacattagaaaaatagcaacttgtgttacaaaaatacaaacacatgttaggaaggtactgtcatgggctaggcatggtggctcacacctgtaatcccagcattttgggaagctaagatgggtggatcacttgaggtcaggagtttgagaccagcctggccaacatggcgaaacccctctctactaaaaatacaaaaatttgccaggcgtggtggcgggtgcctgtaatcccagctacttgggaggctgaggcaagagaatcgcttgaacccaggaggcagaggttgcagtgagccgagatcgtgccattgcactccagcctgggtgacaaagcgagactccatctcaaaaaaaaaaaaaaaaaaaaaggaaagaactgtcatgtaaacataccaacatgtttaaacctgacaatggtgttatttgaaactttatattgttcttgtaagctttaactatatctctctttaaaatgcaaaataatgtcttaagattcaaagtctgtatttttaaagcatggctttggctttgcaaaataaaaaatgtgttttgtacatgaa

SEQ ID NO: 7 - DNA, 5674 bp, Homo sapiens
  misc_feature: enamelin
ctttttattttgagcctttttgatactgaacatgatatctgagtgaagaatttttgttttattattaagaaataaatgtatcttgcttcttgagatctccctggcttcagcaatttgtagttatttccactatagaccattaagaatatatttcaaaggcaagctaacaaagttcaagtaaaaattattttttatatattacagcttctaattggcattggtttcttctcaggttaaagctgtatttttcttaaaggcttataaaaattttgctgaaaaaaatgttggtgcttcggtgcaggcttggaacctcttttcctaaactagataacttggtaccaaaaggcaaaatgaagattctcctggtctttctagggcttcttggtaattctgttgctatgccaatgcacatgccccgaatgcctggatttagcagtaaaagtgaggagatgatgcggtataatcaattcaactttatgaacggcccacatatggcacacctggggcccttctttggaaacggtctccctcagcaatttccacagtaccagatgcccatgtggcctcagccaccacccaacacatggcatccacggaaatcctcagcacccaaacgtcataacaagactgatcagacccaagaaacccagaaacccaaccagactcagtcaaaaaagccaccacaaaagcggcctttgaagcagccatcacataatcaacctcagcccgaagaggaagctcaaccccctcaggcattcccaccatttggaaatgggctattcccctatcaacaaccaccatggcaaattccacagaggttaccaccaccaggttatggacgcccaccaatcagcaatgaagaaggggggaatccttactttggatattttggatatcatggctttgggggtcgccctccttattattcagaagaaatgtttgaacaagattttgaaaaacccaaagaagaagatcctcctaaagcagaaagtccaggcacagaacccacagctaattcaacagtcactgagacgaattctacccaaccaaatcctaaagggagtcagggaggaaatgacaccagccccacaggaaacagtaccccaggactaaacactgggaacaaccctccagctcaaaatgggattggcccactccctgcagtcaacgcttcaggccagggagggccaggaagtcaaatcccatggagaccaagtcagccaaatattcgtgaaaatcatccatatcctaatataagaaattttccttcaggaagacagtggtatttcactggtactgtcatggggcacagacagaataggcctttttacagaaatcaacaagttcaaaggggtcctcggtggaacttctttgcttgggaacgtaaacaagtagctcgtccaggaaatccagtttatcacaaagcttaccctcctacttcaagaggcaattatcccaattatgcaggaaatccagcaaatctcagaagaaagcctcaggggccaaataaacaccctgtaggaactactgttgccccactgggtcccaaacctggccctgttgttcgcaatgaaaaaatccaaaatccaaaggagaagcccctgggtccaaaagaacaaataatagttcctacaaagaatccaaccagcccctggagaaactctcaacagtatgaagttaataaatcaaattataaactgcctcactctgagggttatatgccagtcccaaattttaattctgttgatcaacatgaaaactcctattacccaagaggagattccagaaaagtcccaaattctgatggacaaacccaaagccagaatttgcccaaagggattgttttagggtcaagaaggatgccatatgaatcagaaactaatcagtcagaattaaagcacagctcatatcagcctgctgtataccctgaggaaatcccttctcctgcaaaagaacattttcctgctggaagaaatacttgggaccaccaagaaatctctccaccttttaaggaagatccagggaggcaagaagaacatttaccccatccttcccatggttctagaggaagtgttttctaccctgaatataacccatatgatcccagggaaaactcaccataccttagaggcaatacatgggatgagagagatgattctcccaatactatggggcaaaaagaaagtccactctaccccataaataccccagaccagaaggagatagtcccttataatgaagaggacccagttgatccaactggagatgaagtctttcctggacaaaatagatggggtgaagagttgagcttcaaaggaggcccaacagttaggcactatgaaggtgaacaatatacctcaaatcagccaaaggaatatcttccctattctttagataatccatcaaaaccaagggaggatttttattacagtgaattttacccatggagcccggatgagaattttccatcatataatacagcttctactatgccaccacctatagagagcaggggctactacgttaataatgccgctggaccagaagaaagcactctatttccttcacggaattcctgggaccacaggatacaagcccaagggcagagagaaagaaggccgtattttaacagaaatatctgggatcaggcaacacatttacaaaaagccccagctaggccaccagaccagaaaggtaaccagccctattacagtaacaccccagctgggcttcagaaaaatccaatatggcatgaaggtgagaatttgaactatggcatgcaaataactaggatgaattctccagagagagaacattcatctttccctaacttcatcccaccaagttacccatcaggtcaaaaagaagcacatttatttcacctaagccagagaggctcttgctgtgctggtagctccacagggcccaaggacaatccactagctctacaagactacactccatcctatggtcttgcacctggggagaaccaagacaccagtcctctgtatacagacggtagtcataccaagcagacaagagatatcatctccccaacaagcatcctaccaggccaaagaaacagctcagagaagagggaaagccaaaacccttttagagatgatgtgtccacgctgaggaggaacacaccatgttctataaagaatcaactgggccaaaaggaaattatgccctttcctgaagccagttcccttcaatcaaagaatacaccttgtctcaaaaatgatcttggaggagatgggaacaacattctggaacaagtttttgaagacaaccagctcaatgaaagaactgttgaccttactcctgagcagcttgttattggtacacctgatgaaggctccaatccagaaggcatccaaagtcaagtccaagaaaatgagagtgagaggcaacagcaaagaccatctaacattctgcatttgccatgctttggctccaaattagcaaagcatcactcttccaccaccggaactccatctagcgatggaaggcaaagcccatttgatggggattcaattacgcctactgaaaatcctaacacattggttgagttagctactgaggaacaatttaagagtataaatgtagacccacttgatgcagatgaacacagtccatttgaattccttcaaagagggaccaatgtacaggaccaggtacaagactgcttactacttcaggcctaggggttatccaaccaagcattcttggggaaagagaaatcactgacattctataccaatggttcccaaaattttttccccaagacttaattaagtgtctgactgtcttggtgatccttaagttttctcccctctcagcaataggagtagcgacccaggtggagctgagattaggcctctggggatcaccagatctagcactttcacagattagtgcagaccttaaaaaagcaagaaggccatgaccatccctgcctcgaaacttgcaagtcacttgtctgagttagtttccttttgcttgatgacttcttttgctctcaaagttccatacttgcaaaattggtttttcaagactgaaaggcagattaactttccattctacttatggagatccacacatcagtatagtcctgatgcactgtacgttttttgcttgtgttgatcttgtcaggtttttttcctactcaatattctcttcaagcattttttttcttccactgccactctctttacctttatcatttctttttcttagctttcttccttcttttctctctccctcaaccattctgtatttagctttctaatcctcatctttttctctctgtatatcacttcttacatattaaattagctattttaaccatttctagtctcttctttatgtctacctcctccattatgtcttcgtctcttccaacctatctgttctgtctcccaatgtaccacttatcaactaatccctctcctctctgattcctttcttcccttcaatttatctttttccctgttacaccattttcatcttaagactgcatgtcactctcttcctttttgtatccactctccaaatcgtaccctaaatttttcttgacccagcttaaccatcattacagaatatattttggaaatggtagacactgatagctactttgtttttagttatcttagggtctctaccaagtagacacagttcagttagagagacgtatttaaggagaagggaaggcaggatacccagaactagcagcctagggaaaaggcttaggaagatggagaatgaggaactgaagaaactgccgctctgagactgcacatccaggaaaaaagactaggacttgccacacactgccaattcataatccgcaggatctgtagaagacattttgggaaacactgtcttaaataaaaactcaatgtttagttgtttttttttttttttactagttcagcataagggattctaccagtatgtgctactactaacattcttcatgtccatgcagaattacttacagacactctttcttggtatcttgaataaattgtgtaaattattttgaaaagtggatatttctatatgccttgcttataatacatcagggattattattcttattaataacatgttggcctattatctggatgtcccttgcctagagcaggaaaaaagtctcagaattacctaaaaacatactttataactttaagagatttcttaggatacatcttcaggggcagatttcataacaacatctcaaaaatttggggaaacacaacgttgaaaacttcctaagaaaaggaatcttgcccttgaatcttctgaagtacctagcacagtgtcttcaacatagaaggtacccaataaatatatatcaattcattttttaatgactttcaacactcccatgaaaacaccgtagtctgcttttcctgaaaggtgactgtctaggatgctgaatgagccaccactccgtagctttatatattcagcaacatttccatcatagaatttcagcgttagaagggatcttagaggtagattatccaggccatcccctactgcttacattcccctccccctggccagttttatattttaatcacacattgaaaaattcattaacttattctgtataaaactgtcttttaagaattatcctttcaaaataaaaatgttattgttt

SEQ ID NO: 8 - DNA, 2551 bp, Homo sapiens
  misc_feature: growth arrest specific 6
cccgcgcgcagccgcccgaacacgcccagaccgagcgcttgaggtgccgcagccgccgccgccgccgccgccgcgatgtgaccttcagggccgccaggacgggatgaccggagcctccgccccgcggcgcccgcggctcgcctcggcctcccgggcgctctgaccgcgcgtccccggcccgccatggccccttcgctctcgcccgggcccgccgccctgcgccgcgcgccgcagctgctgctgctgctgctggccgcggagtgcgcgcttgccgcgctgttgccggcgcgcgaggccacgcagttcctgcggcccaggcagcgccgcgcctttcaggtcttcgaggaggccaagcagggccacctggagagggagtgcgtggaggagctgtgcagccgcgaggaggcgcgggaggtgttcgagaacgaccccgagacggattatttttacccaagatacttagactgcatcaacaagtatgggtctccgtacaccaaaaactcaggcttcgccacctgcgtgcaaaacctgcctgaccagtgcacgcccaacccctgcgataggaaggggacccaagcctgccaggacctcatgggcaacttcttctgcctgtgtaaagctggctgggggggccggctctgcgacaaagatgtcaacgaatgcagccaggagaacgggggctgcctccagatctgccacaacaagccgggtagcttccactgttcctgccacagcggcttcgagctctcctctgatggcaggacctgccaagacatagacgagtgcgcagactcggaggcctgcggggaggcgcgctgcaagaacctgcccggctcctactcctgcctctgtgacgagggctttgcgtacagctcccaggagaaggcttgccgagatgtggacgagtgtctgcagggccgctgtgagcaggtctgcgtgaactccccagggagctacacctgccactgtgacgggcgtgggggcctcaagctgtcccaggacatggacacctgtgaggacatcttgccgtgcgtgcccttcagcgtggccaagagtgtgaagtccttgtacctgggccggatgttcagtgggacccccgtgatccgactgcgcttcaagaggctgcagcccaccaggctggtagctgagtttgacttccggacctttgaccccgagggcatcctcctctttgccggaggccaccaggacagcacctggatcgtgctggccctgagagccggccggctggagctgcagctgcgctacaacggtgtcggccgtgtcaccagcagcggcccggtcatcaaccatggcatgtggcagacaatctctgttgaggagctggcgcggaatctggtcatcaaggtcaacagggatgctgtcatgaaaatcgcggtggccggggacttgttccaaccggagcgaggactgtatcatctgaacctgaccgtgggaggtattcccttccatgagaaggacctcgtgcagcctataaaccctcgtctggatggctgcatgaggagctggaactggctgaacggagaagacaccaccatccaggaaacggtgaaagtgaacacgaggatgcagtgcttctcggtgacggagagaggctctttctaccccgggagcggcttcgccttctacagcctggactacatgcggacccctctggacgtcgggactgaatcaacctgggaagtagaagtcgtggctcacatccgcccagccgcagacacaggcgtgctgtttgcgctctgggcccccgacctccgtgccgtgcctctctctgtggcactggtagactatcactccacgaagaaactcaagaagcagctggtggtcctggccgtggagcatacggccttggccctaatggagatcaaggtctgcgacggccaagagcacgtggtcaccgtctcgctgagggacggtgaggccaccctggaggtggacggcaccaggggccagagcgaggtgagcgccgcgcagctgcaggagaggctggccgtgctcgagaggcacctgcggagccccgtgctcacctttgctggcggcctgccagatgtgccggtgacttcagcgccagtcaccgcgttctaccgcggctgcatgacactggaggtcaaccggaggctgctggacctggacgaggcggcgtacaagcacagcgacatcacggcccactcctgcccccccgtggagcccgccgcagcctaggcccccacgggacgcggcaggcttctcagtctctgtccgagacagccgggaggagcctgggggctcctcaccacgtggggccatgctgagagctgggctttcctctgtgaccatcccggcctgtaacatatctgtaaatagtgagatggacttggggcctctgacgccgcgcactcagccgtgggcccgggcgcggggaggccggcgcagcgcagagcgggctcgaagaaaataattctctattatttttattaccaagcgcttctttctgactctaaaatatggaaaataaaatatttacagaaagctttgtaaaaaaaaaaaaaaaaaa

SEQ ID NO: 9 - DNA, 3957 bp, Homo sapiens
  misc_feature: guanylate binding protein 5
cactgaggtcaccctccaggctgtggaacctttgttctttcactctttgcaataaatcttgctgctgctcactctttgggtccacactgcctttatgagctgtaacactcactgggaatgtctgcagcttcactcctgaagccagcgagaccacgaacccaccaggaggaacaaacaactccagacgcgcagccttaagagctgtaacactcaccgcgaaggtctgcagcttcactcctgagccagccagaccacgaacccaccagaaggaagaaactccaaacacatccgaacatcagaaggagcaaactcctgacacgccacctttaagaaccgtgacactcaacgctagggtccgcggcttcattcttgaagtcagtgagaccaagaacccaccaattccggacacggcaaagtaacatcctagacatggctttagagatccacatgtcagaccccatgtgcctcatcgagaactttaatgagcagctgaaggttaatcaggaagctttggagatcctgtctgccattacgcaacctgtagttgtggtagcgattgtgggcctctatcgcactggcaaatcctacctgatgaacaagctggctgggaagaacaagggcttctctgttgcatctacggtgcagtctcacaccaagggaatttggatatggtgtgtgcctcatcccaactggccaaatcacacattagttctgcttgacaccgagggcctgggagatgtagagaaggctgacaacaagaatgatatccagatctttgcactggcactcttactgagcagcacctttgtgtacaatactgtgaacaaaattgatcagggtgctatcgacctactgcacaatgtgacagaactgacagatctgctcaaggcaagaaactcacccgaccttgacagggttgaagatcctgctgactctgcgagcttcttcccagacttagtgtggactctgagagatttctgcttaggcctggaaatagatgggcaacttgtcacaccagatgaatacctggagaattccctaaggccaaagcaaggtagtgatcaaagagttcaaaatttcaatttgccccgtctgtgtatacagaagttctttccaaaaaagaaatgctttatctttgacttacctgctcaccaaaaaaagcttgcccaacttgaaacactgcctgatgatgagctagagcctgaatttgtgcaacaagtgacagaattctgttcctacatctttagccattctatgaccaagactcttccaggtggcatcatggtcaatggatctcgtctaaagaacctggtgctgacctatgtcaatgccatcagcagtggggatctgccttgcatagagaatgcagtcctggccttggctcagagagagaactcagctgcagtgcaaaaggccattgcccactatgaccagcaaatgggccagaaagtgcagctgcccatggaaaccctccaggagctgctggacctgcacaggaccagtgagagggaggccattgaagtcttcatgaaaaactctttcaaggatgtagaccaaagtttccagaaagaattggagactctactagatgcaaaacagaatgacatttgtaaacggaacctggaagcatcctcggattattgctcggctttacttaaggatatttttggtcctctagaagaagcagtgaagcagggaatttattctaagccaggaggccataatctcttcattcagaaaacagaagaactgaaggcaaagtactatcgggagcctcggaaaggaatacaggctgaagaagttctgcagaaatatttaaagtccaaggagtctgtgagtcatgcaatattacagactgaccaggctctcacagagacggaaaaaaagaagaaagaggcacaagtgaaagcagaagctgaaaaggctgaagcgcaaaggttggcggcgattcaaaggcagaacgagcaaatgatgcaggagagggagagactccatcaggaacaagtgagacaaatggagatagccaaacaaaattggctggcagagcaacagaaaatgcaggaacaacagatgcaggaacaggctgcacagctcagcacaacattccaagctcaaaatagaagccttctcagtgagctccagcacgcccagaggactgttaataacgatgatccatgtgttttactctaaagtgctaaatatgggagtttcctttttttactctttgtcactgatgacacaacagaaaagaaactgtagaccttgggacaatcaacatttaaataaactttataattattttttcaaactttcatatagagttataagattatgatgctggtatctggtaaaatgtacatcccagtagtccaatagtttaaatgtttattgcttcctttaagagattataaattgtataagggacattgtatcactgccttcatttatgcgtgatattgggatggtttcatcaggagatgctttccttgcatctcaatgtcatctgtctaatttctcataaggggattatgttacctagagcagggcttcccaaccctcaggccatagactagctctgatctgtggcctcttaggaacccggccacacagcaggaggtgagcagcaggtaagtgagcattacagcctgagctccacctcctgtcagatcagcagtgacattagattctcacaggagtgggaaccctattgtgaactgtgcatgcaaaagatctaggttgtgtgatccttgtggaacaatataaaccagaaaccaataacgccaccccacctccaacccccgccaaccctctgtggaaaaattaccttccacgaaactggtccctgatgccaaataggttgggggaccgctgacctagagggagttatgcacatgggcttataaggttagccaagagaaaggacaagaagacccaaagtcggcaagcaaatttattaacctgctgggctgctctacagaaatctgaggaggcagacaccgggcttacaggctaaggggtataagtaggtctgcaggggttttgtgtgtgtgtgcgggggtgtcgggggggcaaggccatttgtggagacttttcctcccagtatggccacatcctgcagtttgtcagtttttgcccccgcctggctcagggtaccaggatgtggtttagcttaggggtggttatagtggcacctaagttctgggaacttgcggtgggggcgaccttttggacgaaaaataagctgcagggcagctaggggagggggcttgttatattcctctgggggcagggtgtccctaactgggctcagtcggaaggaacttgaccaaagtctgggctcagttgggcatcactcaggctaatggtcgtgtgctggatgccatcagagggaagtaccaatggtaaagtggaaacaatgtgcagctttcaactgggtggaggctgctattctgtggacagtgagatgtttccttggcactgtcaatagacaatctgcgtagagaaattccaagctgaaagccaataatgttataataaaatagagattcttcagaagatgaaaggaattaccagcatggaaattgtgtcataggcttaagggctaaagaagaagccttttcttttctgttcaccctcaccaagagcacaacttaaatagggcattttataacctgaacacaatttatattggacttaattattatgtgtaatatgtttataatcctttagatcttataaatatgtggtataaggaatgccatataatgtgccaaaaatctgagtgcatttaatttaatgcttgcttatagtgctaaagttaaatgatcttaattctttgcaattatatatgaaaaatgactgatttttcttaaaatatgtaacttatataaatatatctgtttgtacagattttaaccataaaaacatttttggaaaaccataaaaaaaaaaaaaaaa

SEQ ID NO: 10 - DNA, 6780 bp, Homo sapiens
  misc_feature: GLI family zinc finger 2
gattgccacccaggacgatgagcggctgagatggagacgtctgcctcagccactgcctccgagaagcaagaagccaaaagtgggatcctggaggccgctggcttccccgacccgggtaaaaaggcctctcctttggtggtggctgcagcggcagcagcagcggtagctgcccaaggagtgccgcagcatctcttgccaccattccatgcgcccctaccgattgacatgcgacaccaggaaggaaggtaccattacgagcctcattctgtccacggtgtgcacgggccccctgccctcagcggcagccctgtcatctctgacatctccttgatccggctttccccgcacccggctggccctggggagtcccccttcaacgccccccacccgtacgtgaacccccacatggagcactacctccgttctgtgcacagcagccccacgctctccatgatctctgcagccaggggcctcagccccgctgatgtggcccaggagcaccttaaggagaggggactgtttggccttcctgctccaggcaccaccccctcagactattaccaccagatgaccctcgtggcaggccaccccgcgccctacggggacctgctgatgcagagcgggggcgctgccagcgcaccccatctccacgactacctcaaccccgtggacgtgtcccgtttctccagcccgcgggtgacgccccgcctgagccgcaagcgggcgctgtccatctccccactctcagacgccagcctggacctgcagcggatgatccgcacctcacccaactcgctagtggcctacatcaacaactcccgaagcagctcggcggccagcggttcctacgggcatctgtcagcgggtgccctcagcccagccttcaccttcccccaccccatcaaccccgtggcctaccagcagattctgagccagcagaggggtctggggtcagcctttggacacacaccacccctgatccagccctcacccaccttcctggcccagcagcccatggccctcacctccatcaatgccacgcccacccagctcagcagcagcagcaactgtctgagtgacaccaaccagaacaagcagagcagtgagtcggccgtcagcagcaccgtcaaccctgtcgccattcacaagcgcagcaaggtcaagaccgagcctgagggcctgcggccggcctcccctctggcgctgacgcagggccaggtgtctggacacggctcatgtgggtgtgcccttcccctctcccaggagcagctggctgacctcaaggaagatctggacagggatgactgtaagcaggaggctgaggtggtcatctatgagaccaactgccactgggaagactgcaccaaggagtacgacacccaggagcagctggtgcatcacatcaacaacgagcacatccacggggagaagaaggagtttgtgtgccgctggcaggcctgcacgcgggagcagaagcccttcaaggcgcagtacatgctggtggtgcacatgcggcgacacacgggcgagaagccccacaagtgcacgttcgagggctgctcgaaggcctactcccgcctggagaacctgaagacacacctgcggtcccacaccggggagaagccatatgtgtgtgagcacgagggctgcaacaaagccttctccaacgcctcggaccgcgccaagcaccagaatcgcacccactccaacgagaaaccctacatctgcaagatcccaggctgcaccaagagatacacagaccccagctctctccggaagcatgtgaaaacggtccacggcccagatgcccacgtcaccaagaagcagcgcaatgacgtgcacctccgcacaccgctgctcaaagagaatggggacagtgaggccggcacggagcctggcggcccagagagcaccgaggccagcagcaccagccaggccgtggaggactgcctgcacgtcagagccatcaagaccgagagctccgggctgtgtcagtccagccccggggcccagtcgtcctgcagcagcgagccctctcctctgggcagtgcccccaacaatgacagtggcgtggagatgccggggacggggcccgggagcctgggagacctgacggcactggatgacacacccccaggggccgacacctcagccctggctgccccctccgctggtggcctccagctgcgcaaacacatgaccaccatgcaccggttcgagcagctcaagaaggagaagctcaagtcactcaaggattcctgctcatgggccgggccgactccacacacgcggaacaccaagctgcctcccctcccgggaagtggctccatcctggaaaacttcagtggcagtgggggcggcgggcccgcggggctgctgccgaacccgcggctgtcggagctgtccgcgagcgaggtgaccatgctgagccagctgcaggagcgccgcgacagctccaccagcacggtcagctcggcctacaccgtgagccgccgctcctccggcatctccccctacttctccagccgccgctccagcgaggcctcgcccctgggcgccggccgcccgcacaacgcgagctccgctgactcctacgaccccatctccacggacgcgtcgcggcgctcgagcgaggccagccagtgcagcggcggctccgggctgctcaacctcacgccggcgcagcagtacagcctgcgggccaagtacgcggcagccactggcggccccccgcccactccgctgccgggcctggagcgcatgagcctgcggaccaggctggcgctgctggacgcgcccgagcgcacgctgcccgccggctgcccacgcccactggggccgcggcgtggcagcgacgggccgacctatggccacggccacgcgggggctgcgcccgccttcccccacgaggctccaggcggcggagccaggcgggccagcgaccctgtgcggcggcccgatgccctgtccctgccgcgggtgcagcgcttccacagcacccacaacgtgaaccccggcccgctgccgccctgtgccgacaggcgaggcctccgcctgcagagccacccgagcaccgacggcggcctggcccgcggcgcctactcgccccggccgcctagcatcagcgagaacgtggcgatggaggccgtggcggcaggagtggacggcgcggggcccgaggccgacctggggctgccggaggacgacctggtgcttccagacgacgtggtgcagtacatcaaggcgcacgccagtggcgctctggacgagggcaccgggcaggtgtatcccacggaaagcactggcttctctgacaaccccagactacccagcccggggctgcacggccagcgcaggatggtggctgcggactccaacgtgggcccctccgcccctatgctgggaggatgccagttaggctttggggcgccctccagcctgaacaaaaataacatgcctgtgcagtggaatgaggtgagctccggcaccgtagacgccctggccagccaggtgaagcctccaccctttcctcagggcaacctggcggtggtgcagcagaagcctgcctttggccagtacccgggctacagtccgcaaggcctacaggctagccctgggggcctggacagcacgcagccacacctgcagccccgcagcggagccccctcccagggcatccccagggtaaactacatgcagcagctgcgacagccagtggcaggcagccagtgtcctggcatgactaccactatgagcccccatgcctgctatggccaagtccacccccagctgagccccagcaccatcagtggggccctcaaccagttcccccaatcctgcagcaacatgccagccaagccagggcatctggggcaccctcagcagacagaagtggcacctgaccccaccacgatgggcaatcgccacagggaacttggggtccccgattcagccctggctggagtgccaccacctcacccagtccagagctacccacagcagagccatcacctggcagcctccatgagccaggagggctaccaccaggtccccagccttctgcctgcccgccagcctggcttcatggagccccaaacaggcccgatgggggtggctacagcaggctttggcctagtgcagccccggcctcccctcgagcccagccccactggccgccaccgtggggtacgtgctgtgcagcagcagctggcctacgccagggccacaggccatgccatggctgccatgccgtccagtcaggaaacagcagaggctgtgcccaagggagcgatgggcaacatggggtcggtgcctccccagccgcctccgcaggacgcaggtggggccccggaccacagcatgctctactactacggccagatccacatgtacgaacaggatggaggcctggagaacctcgggagctgccaggtcatgcggtcccagccaccacagccacaggcctgtcaggacagcatccagccccagcccttgccctcaccaggggtcaaccaggtgtccagcactgtggactcccagctcctggaggccccccagattgacttcgatgccatcatggatgatggcgatcactcgagtttgttctcgggtgctctgagccccagcctcctccacagcctctcccagaactcctcccgcctcaccaccccccgaaactccttgaccctgccctccatccccgcaggcatcagcaacatggctgtcggggacatgagctccatgctcaccagcctcgccgaggagagcaagttcctgaacatgatgacctagaggcccgagcgcctggtgctgagtgcacccggaggggtcatcgctgcccagagcctggggattccagctgtcttgtctttttccaaaaaagtgttaaataggcttgaggggttgttgcgcaatggccgcttcagatgacagatgttgtaagagaaggtttatgggcatcctctctggtcttttggattattcctcagaacaatgaaaaaagtctccataggacaggaaggaatgcaaaactcatttacacagtgctttccagcctttggtgcttacaggaccgcgctgttccggcttcttcacggctgacattcggctaacgagggattactttggccaaaacctttcaaaggatatgcagaaagatggtagggagcatttgggtttgaatctgaatgctatactggatactctgctccggaaagatgagctttttattctactacttggaaggaaaaggaattcctggtccacctgaattcctctatgaagcctaactcttgaggtctctaacataccttgtcatagaggaaaagcacagattatacctggatgattcaggagcacattctgattccaggtttggtagagctggctcttctactccgtaaagccgagtctgggactggcagcccatccaagtgtatatgaatgaataaagcatccaagtatatatgaatgaataaagtatgtaagtatcaccagaaaaaggaaagaaaaaatgtactccttggggcaagcccagaagctgccctggcctctccagaccgtgtttacagtgtttgcatgtagaatgtagcccttcctgaaaagaagacttgtttctaaatacctcggggctgctggagccgctgtgggttagggatggactgaggcctcgaggagtgagggtgcacccggggcccagcctcaggctgccctagggatctctcagtaggaagaggaagttgcgtgtttacccaatcctgtttctccaatgcaacgtccacccactttaccaccaaaaactccagggcctgacggcagcccggtcccccagcactcaccagcagcccagtgttctccaccaagccacagtgtgcatgcctggtatcctccggattcccttccttctgcccgctgagtcactgggcagagaatgatgacatgtgtaggtggtgtggttgggggtggaaaggggaaggggttgatcctcaggactctgagggagcatcgttgaattttcctgttcagtgtgaccaagacccacctggaaatggaatttggaactggcttcaggagacatcattcctgaacacactgtagggtgaattggtgcatcttccccaccatacacacacacacacacacacacacacacacacacacacacacaccccaaaccttttcatggggaatgtgtggcaaccttgccaaacagcaccactcagagtgtgactctgactgtgaccttggccttaatgaggaacttcttaggagagtttgaggacaaggccaacatcgtcatctgggctcgctgcgtcccagcacatcaaactctgtccagagacaaggccaactgcaaatgaaagccagggaacattgctaagggtctgtggctctgtggtggtgttcatcgccttcctgagataggatttcccttgccagtcccaacctgtatatattctgtacagaagacatccctgaatatactgtaggtgagtcgtccagccaaatttatatctccaaaacatttttagctttttctacatgctatgaattgagatgacatgctcaacttgtaaataagtctttttgtacattaaaaaagtaattttttcataatttatcttgtctatctgcttcccccttgacagtagttaatgagaacctgggcagtaaatttggtgcattcgagcagaaattaggctgtattttttcttaacagtgtcaaaattgactatcccgcctttgccaagaaatgtttaatgctgaggcaaaaaaaaaaaa

SEQ ID NO: 11 - DNA, 5468 bp, Homo sapiens
  misc_feature: adhesion G protein-coupled receptor F1 (Isoform I)
agtaatgcgtgccaggaattgctgatggatcagtgagcctgtgttcatgccagtgagctgctgtggctcagatactgatactttctttccaaacagcataagaagtgattgagccacaagtatactgaaggaagggctccctcgagttctggtgtgaagagataaatcaccagtcacagactatgcacccgactgctgctgttcagtccagggaaaatgaaagttggagtgctgtggctcatttctttcttcaccttcactgacggccacggtggcttcctggggaaaaatgatggcatcaaaacaaaaaaagaactcattgtgaataagaaaaaacatctaggcccagtcgaagaatatcagctgctgcttcaggtgacctatagagattccaaggagaaaagagatttgagaaattttctgaagctcttgaagcctccattattatggtcacatgggctaattagaattatcagagcaaaggctaccacagactgcaacagcctgaatggagtcctgcagtgtacctgtgaagacagctacacctggtttcctccctcatgccttgatccccagaactgctaccttcacacggctggagcactcccaagctgtgaatgtcatctcaacaacctcagccagagtgtcaatttctgtgagagaacaaagatttggggcactttcaaaattaatgaaaggtttacaaatgaccttttgaattcatcttctgctatatactccaaatatgcaaatggaattgaaattcaacttaaaaaagcatatgaaagaattcaaggttttgagtcggttcaggtcacccaatttcgaaatggaagcatcgttgctgggtatgaagttgttggctccagcagtgcatctgaactgctgtcagccattgaacatgttgccgagaaggctaagacagcccttcacaagctgtttccattagaagacggctctttcagagtgttcggaaaagcccagtgtaatgacattgtctttggatttgggtccaaggatgatgaatataccctgccctgcagcagtggctacaggggaaacatcacagccaagtgtgagtcctctgggtggcaggtcatcagggagacttgtgtgctctctctgcttgaagaactgaacaagaatttcagtatgattgtaggcaatgccactgaggcagctgtgtcatccttcgtgcaaaatctttctgtcatcattcggcaaaacccatcaaccacagtggggaatctggcttcggtggtgtcgattctgagcaatatttcatctctgtcactggccagccatttcagggtgtccaattcaacaatggaggatgtcatcagtatagctgacaatatccttaattcagcctcagtaaccaactggacagtcttactgcgggaagaaaagtatgccagctcacggttactagagacattagaaaacatcagcactctggtgcctccgacagctcttcctctgaatttttctcggaaattcattgactggaaagggattccagtgaacaaaagccaactcaaaaggggttacagctatcagattaaaatgtgtccccaaaatacatctattcccatcagaggccgtgtgttaattgggtcagaccaattccagagatcccttccagaaactattatcagcatggcctcgttgactctggggaacattctacccgtttccaaaaatggaaatgctcaggtcaatggacctgtgatatccacggttattcaaaactattccataaatgaagttttcctatttttttccaagatagagtcaaacctgagccagcctcattgtgtgttttgggatttcagtcatttgcagtggaacgatgcaggctgccacctagtgaatgaaactcaagacatcgtgacgtgccaatgtactcacttgacctccttctccatattgatgtcaccttttgtcccctctacaatcttccccgttgtaaaatggatcacctatgtgggactgggtatctccattggaagtctcattttatgcctgatcatcgaggctttgttttggaagcagattaaaaaaagccaaacctctcacacacgtcgtatttgcatggtgaacatagccctgtccctcttgattgctgatgtctggtttattgttggtgccacagtggacaccacggtgaacccttctggagtctgcacagctgctgtgttctttacacacttcttctacctctctttgttcttctggatgctcatgcttggcatcctgctggcttaccggatcatcctcgtgttccatcacatggcccagcatttgatgatggctgttggattttgcctgggttatgggtgccctctcattatatctgtcattaccattgctgtcacgcaacctagcaatacctacaaaaggaaagatgtgtgttggcttaactggtccaatggaagcaaaccactcctggcttttgttgtccctgcactggctattgtggctgtgaacttcgttgtggtgctgctagttctcacaaagctctggaggccgactgttggggaaagactgagtcgggatgacaaggccaccatcatccgcgtggggaagagcctcctcattctgacccctctgctagggctcacctggggctttggaataggaacaatagtggacagccagaatctggcttggcatgttatttttgctttactcaatgcattccagggattttttatcttatgctttggaatactcttggacagtaagctgcgacaacttctgttcaacaagttgtctgccttaagttcttggaagcaaacagaaaagcaaaactcatcagatttatctgccaaacccaaattctcaaagcctttcaacccactgcaaaacaaaggccattatgcattttctcatactggagattcctccgacaacatcatgctaactcagtttgtctcaaatgaataaggcaaggaatcataaaatcaagaaaaaatttccagaacaacttgacatttagagacaaatgtcaatgaagaaattatgctcagtattcgatcgggttttctgatttaggggtctgggaataaaacaagaatgtctcagtggcttcattactgctcccttttgtcttcaattaaatgaaaagaagatttatttccatgtgatttgattcaaagaaagtgctccataaatgcagaagagtaggttttgttggaaatcgtgtcagttgtaccctgaccataaaatatggtttctattttcataaaacagcattattcacatggcatttccaataatctggattgaaggaagaaaattttatgaaatagctttagataaattaataggccacgttcattttcttgtcaaaaagttactggtggggggatggtgggaaaaagttattagtgcaaatttcctagagaaaaaaccatttctctttcaaattttccagttgaattttatgttcgcttttgcttcttaggttctatcacttaatattgaaagttaatcagaaataaaatgtaaacttctatttcagatagctttgtaaccatttatcagaaagtataataatgtgatatgatatataatgtggtatttttcagtttacaaggcacttccatctggtcctaaaccctgcaaacaaaagtgtcaaggcagacctagtgcagagatgagggcatgggggctcagagaggtaaagtgacttgccaaagattgtgaagccagttaagggaaattggggatttttaggacatttgtctcccagaccatttctacagccaataaaagccttgaaaattacctacatctctagtaaatctttctgaggtcagttacacagttcaccattcccagaattctatgtaagagagaaattaagggagaatttggttgtcagcttccagggaggtaccttaaaacatccttattttctttcataatacaccataggcactttgtggaagttattttcttgtacagccagtgccacttttggatgacatacaaagcagcaggagttgacgctatgtgaagcaacacttctcttccatacttccatcacatttggctcacctacctgagtttcagccgtgaccatagtgcccagaggaacccgagcctttgattcatccttgctgttttgagaggcctagggagtgtctcttagcctcctgacatggaaagccttcatgctatgcaaataaagacagctgggggaacttctagttagtggtggtagattaaataagcatacctgagagaaattcaaagttagacttccacaaggcaccaaggtgcagcacacatgaaatatgaaagtgagaggttcaaaggaaatgactgaggatcagttagatggttctataccccacaaatatgtatgagagtcaacagaattttatgagaaagacttctttgcagaaaactgctctatgagccttctcactctacctacccacaaaagtgagagaaggaggaatgtctgctccttgacctcaaatttagtgagagaagatttctcagatagctcagatagctcagatttctcagaaccacaacaattaggatgcatggctgatggaagtctgattcttgcctagaattgtggccacagctccggtagtagagccctgaatgagttctgtgttgagaatagcctgtatgtctagtgtttgtcagggcaatggatgtgtgtgtttcccatgaaccatagtgagacatgcaagagtgaaggtcagcatggggctcttttaggtcctctctgatagggttgtccaaagaggtggagggaacccagcatcaagaagtgggaggtgaagccagattgtgggatgaggaaggagtcacaaatgaccacctggaatacaaaaaaatctacacaagctaaagatgagaagtcagggctatgagaatttctatgggagttcttgaatgctccctctcttattacacacaattactatccagagaaccctgacaccatgtgaaggcagccctatctcataagacagatttctttttttggggaccttggggaaagggaggccagaaacctccgtgtccaaggtggggtggaaggagagggagaaatcttagcaaaaatgtcaaccagcaagggaagatgtgctagcgcaagtaggcaactcaacacaagactcagttggagagggaagaaaaatttagtactaaattattgtagtttcttcttattgtaggcgactgggagtcataattaccaaactatttaaaatgaccaaaatgttgctcttacctgagtatgttggcatacaactggaatgtatctgatggaagaaaaagcttctcccactgaataaattttatgaggatgatgagagacaaaaaaatgtttgatcagatatcatgtatgtgcatgcttgtctaattcactgattatgcatacattcacctcaaaatgctactaaaacaacaataaaataatgaaaaagtgaatagca

SEQ ID NO: 12 - DNA, 1482 bp, Homo sapiens
  misc_feature: adhesion G protein-coupled receptor F1 (Isoform 2)
agtaatgcgtgccaggaattgctgatggatcagtgagcctgtgttcatgccagtgagctgctgtggctcagatactgatactttctttccaaacagcataagaagtgattgagccacaagtatactgaaggaagggctccctcgagttctggtgtgaagagataaatcaccagtcacagactatgcacccgactgctgctgttcagtccagggaaaatgaaagttggagtgctgtggctcatttctttcttcaccttcactgacggccacggtggcttcctggggaaaaatgatggcatcaaaacaaaaaaagaactcattgtgaataagaaaaaacatctaggcccagtcgaagaatatcagctgctgcttcaggtgacctatagagattccaaggagaaaagagatttgagaaattttctgaagctcttgaagcctccattattatggtcacatgggctaattagaattatcagagcaaaggctaccacagactgcaacagcctgaatggagtcctgcagtgtacctgtgaagacagctacacctggtttcctccctcatgccttgatccccagaactgctaccttcacacggctggagcactcccaagctgtgaatgtcatctcaacaacctcagccagagtgtcaatttctgtgagagaacaaagatttggggcactttcaaaattaatgaaaggtttacaaatgaccttttgaattcatcttctgctatatactccaaatatgcaaatggaattgaaattcaacttaaaaaagcatatgaaagaattcaaggttttgagtcggttcaggtcacccaatttcgaatgtcactcttgtcgcccaagttggagtgcaatggcacaatctaggctcactgcaaccctgcaacctctgcctaccgggttcaagagattcccctgcctcagcctcccaagtagctggaattacagacacctgccaccacatccagctaactttttttgtatttttagtagagacagggtttcaccatgttggccacactggtctcaaactcctgacctcaggtgatccgcctgcctcggcccccaaagtgctgggattacaggcatgagccaccacatctggcctaggaccttaaatattggaaagcattctcaaaactgtgggtcagtgagtagaactacaaaacaatagcagtagggcagaaacttgaaagaaggcaggagatcatggtgacagtggatgggaaaaagtgagggttggggataagggttgcgggttgtcgaagggtggattttctccttcagcaactacaggagatatgatgcctcataattcggagccagaagtggggctttgggtgagatatctttgcacagataacatgtatacatcatagttcaaaacccagtagtcattgtttacagcaaataaagaaatatttagtaaattaaaaaaaaaaaaaaaaaaaaaaaaaaaaaaaaaaaaaaaaaaaa

SEQ ID NO: 13 - DNA, 733 bp, Homo sapiens
  misc_feature: interferon induced transmem-brane protein 1
aaacagcaggaaatagaaacttaagagaaatacacacttctgagaaactgaaacgacaggggaaaggaggtctcactgagcaccgtcccagcatccggacaccacagcggcccttcgctccacgcagaaaaccacacttctcaaaccttcactcaacacttccttccccaaagccagaagatgcacaaggaggaacatgaggtggctgtgctgggggcaccccccagcaccatccttccaaggtccaccgtgatcaacatccacagcgagacctccgtgcccgaccatgtcgtctggtccctgttcaacaccctcttcttgaactggtgctgtctgggcttcatagcattcgcctactccgtgaagtctagggacaggaagatggttggcgacgtgaccggggcccaggcctatgcctccaccgccaagtgcctgaacatctgggccctgattctgggcatcctcatgaccattggattcatcctgttactggtattcggctctgtgacagtctaccatattatgttacagataatacaggaaaaacggggttactagtagccgcccatagcctgcaacctttgcactccactgtgcaatgctggccctgcacgctggggctgttgcccctgcccccttggtcctgcccctagatacagcagtttatacccacacacctgtctacagtgtcattcaataaagtgcacgtgcttgtgaaaaaaaaaaaaaaaaa

SEQ ID NO: 14 - DNA, 1413 bp, Homo sapiens
  misc_feature: joining chain of multimeric IgA and IgM
ttgtgattgtttttagtttgttagctgcctggagtgttattttaagaaagcagaagcaccatcatttgcacactccttatagatcacacaccttaaccctgactttttttgctccagtttttcagaagaagtgaagtcaagatgaagaaccatttgcttttctggggagtcctggcggtttttattaaggctgttcatgtgaaagcccaagaagatgaaaggattgttcttgttgacaacaaatgtaagtgtgcccggattacttccaggatcatccgttcttccgaagatcctaatgaggacattgtggagagaaacatccgaattattgttcctctgaacaacagggagaatatctctgatcccacctcaccattgagaaccagatttgtgtaccatttgtctgacctctgtaaaaaatgtgatcctacagaagtggagctggataatcagatagttactgctacccagagcaatatctgtgatgaagacagtgctacagagacctgctacacttatgacagaaacaagtgctacacagctgtggtcccactcgtatatggtggtgagaccaaaatggtggaaacagccttaaccccagatgcctgctatcctgactaatttaagtcattgctgactgcatagctctttttcttgagaggctctccattttgattcagaaagttagcatatttattaccaatgaatttgaaaccagggcttttttttttttttgggtgatgtaaaaccaactccctgccaccaaaataattaaaatagtcacattgttatctttattaggtaatcacttcttaattatatgttcatactctaagtatcaaaatcttccaattatcatgctcacctgaaagaggtatgctctcttaggaatacagtttctagcattaaacaaataaacaaggggagaaaataaaactcaaggactgaaaatcaggaggtgtaataaaatgttcctcgcattcccccccgcttttttttttttttttgactttgccttggagagccagagcttccgcattttctttactattctttttaaaaaaagtttcactgtgtagagaacatatatgcataaacataggtcaattatatgtctccattagaaaaataataattggaaaacatgttctagaactagttacaaaaataatttaaggtgaaatctctaatatttataaaagtagcaaaataaatgcataattaaaatatatttggacataacagacttggaagcagatgatacagacttctttttttcataatcaggttagtgtaagaaattgccatttgaaacaatccattttgtaactgaaccttatgaaatatatgtatttcatggtacgtattctctagcacagtctgagcaattaaatagattcataagcataaaaa

SEQ ID NO: 15 - DNA, 16819 bp, Homo sapiens
  misc_feature: Mucin 4 (isoform A)
ctcttttgtcctcttcccaggttccctggccccttcggagaaacgcacttggttcgggccagccgcctgaggggacgggctcacgtctgctcctcacactgcagctgctgggccgtggagcttccccagggagccagggggacttttgccgcagccatgaagggggcacgctggaggagggtcccctgggtgtccctgagctgcctgtgtctctgcctccttccgcatgtggtcccaggaaccacagaggacacattaataactggaagtaaaactgctgccccagtcacctcaacaggctcaacaacagcgacactagagggacaatcaactgcagcttcttcaaggacctctaatcaggacatatcagcttcatctcagaaccaccagactaagagcacggagaccaccagcaaagctcaaaccgacaccctcacgcagatgatgacatcaactcttttttcttccccaagtgtacacaatgtgatggagacagctcctccagatgaaatgaccacatcatttccctccagtgtcaccaacacactcatgatgacatcaaagactataacaatgacaacctccacagactccactcttggaaacacagaagagacatcaacagcaggaactgaaagttctaccccagtgacctcagcagtctcaataacagctggacaggaaggacaatcacgaacaacttcctggaggacctctatccaagacacatcagcttcttctcagaaccactggactcggagcacgcagaccaccagggaatctcaaaccagcaccctaacacacagaaccacttcaactccttctttctctccaagtgtacacaatgtgacagggactgtttctcagaagacatctccttcaggtgaaacagctacctcatccctctgtagtgtcacaaacacatccatgatgacatcagagaagataacagtgacaacctccacaggctccactcttggaaacccaggggagacatcatcagtacctgttactggaagtcttatgccagtcacctcagcagccttagtaacatttgatccagaaggacaatcaccagcaactttctcaaggacttctactcaggacacaacagctttttctaagaaccaccagactcagagcgtggagaccaccagagtatctcaaatcaacaccctcaacaccctcacaccggttacaacatcaactgttttatcctcaccaagtggattcaacccaagtggaacagtttctcaggagacattcccttctggtgaaacaaccacctcatccccttccagtgtcagcaatacattcctggtaacatcaaaggtgttcagaatgccaacctccagagactctactcttggaaacacagaggagacatcactatctgtaagtggaaccatttctgcaatcacttccaaagtttcaaccatatggtggtcagacactctgtcaacagcactctcccccagttctctacctccaaaaatatccacagctttccacacccagcagagtgaaggtgcagagaccacaggacggcctcatgagaggagctcattctctccaggtgtgtctcaagaaatatttactctacatgaaacaacaacatggccttcctcattctccagcaaaggccacacaacttggtcacaaacagaactgccctcaacatcaacaggtgctgccactaggcttgtcacaggaaatccatctacagggacagctggcactattccaagggtcccctctaaggtctcagcaataggggaaccaggagagcccaccacatactcctcccacagcacaactctcccaaaaacaacaggggcaggcgcccagacacaatggacacaagaaacggggaccactggagaggctcttctcagcagcccaagctacagtgtgactcagatgataaaaacggccacatccccatcttcttcacctatgctggatagacacacatcccaacaaattacaacggcaccatcaacaaatcattcaacaatacattccacaagcacctctcctcaggaatcaccagctgtttcccaaaggggtcacactcaagccccgcagaccacacaagaatcacaaaccacgaggtccgtctcccccatgactgacaccaagacagtcaccaccccaggttcttccttcacagccagtgggcactcgccctcagaaattgttcctcaggacgcacccaccataagtgcagcaacaacctttgccccagctcccaccggggatggtcacacaacccaggccccgaccacagcactgcaggcagcacccagcagccatgatgccaccctggggccctcaggaggcacgtcactttccaaaacaggtgcccttactctggccaactctgtagtgtcaacaccagggggcccagaaggacaatggacatcagcctctgccagcacctcacctgacacagcagcagccatgacccatacccaccaggctgagagcacagaggcctctggacaaacacagaccagcgaaccggcctcctcagggtcacgaaccacctcagcgggcacagctaccccttcctcatccggggcgagtggcacaacaccttcaggaagcgaaggaatatccacctcaggagagacgacaaggttttcatcaaacccctccagggacagtcacacaacccagtcaacaaccgaattgctgtccgcctcagccagtcatggtgccatcccagtaagcacaggaatggcgtcttcgatcgtccccggcacctttcatcccaccctctctgaggcctccactgcagggagaccgacaggacagtcaagcccaacttctcccagtgcctctcctcaggagacagccgccatttcccggatggcccagactcagaggacaagaaccagcagagggtctgacactatcagcctggcgtcccaggcaaccgacaccttctcaacagtcccacccacacctccatcgatcacatccactgggcttacatctccacaaaccgagacccacactctgtcaccttcagggtctggtaaaaccttcaccacggccctcatcagcaacgccacccctcttcctgtcacctacgcttcctcggcatccacaggtcacaccacccctcttcatgtcaccgatgcttcctcagtatccacaggtcacgccacccctcttcctgtcaccagcccttcctcagtatccacaggtcacaccacccctcttcctgtcaccgacacttcctcagaatccacaggtcacgtcacccctcttcctgtcaccagcttttcctcagcatccacaggtgacagcacccctcttcctgtcactgacacttcctcagcatccacaggtcacgtcacccctcttcctgtcaccagcctttcctcagcatccacaggtgacaccacccctcttcctgtcactgacacttcctcagcatccacaggtcacgccacctctcttcctgtcaccgacacttcctcagtatccacaggtcacaccacccctcttcctgtcaccgacacttcctcagcatccacaggtcacgccacctctcttcctgtcaccgacacttcctcagtatccacaggtcacaccacccctcttcatgtcactgatgcttcctcagcatccacaggtcaggccacccctcttcctgtcaccagcctttcctcagtatccacaggtgacaccacgcctcttcctgtcactagcccttcctcagcatccacaggtcacgccacccctcttcttgtcaccgacacttcctcagcatccacaggacacgccacccctcttcctgtcaccgacgcttcctcagtgtccacagatcacgccacctctcttcctgtaaccatcccttccgcagcatccacaggtcacaccacccctcttcctgtcaccgacacttcctcagcatccacaggtcaggccacctctcttcttgtcaccgacacttcctcagtatccacaggtgacaccacgcctcttcctgtcactagcacttcctcagcatccacaggtcacgtcactcctcttcatgtcaccagcccttcctcagcatccacaggtcacgccacccctcttcctgtcaccagcctttcctcagcatccacaggtgacaccatgcctcttcctgtcactagcccttcctcagcatccacaggtgacaccacccctcttcctgtcaccgacgcttcctcagtatccacaggtcacaccacccctcttcatgtcactgatgcttcctcagcatccacaggtcaggccacccctcttcctgtcaccagcctttcctcagtatccacaggtgacaccacgcctcttcctgtcactagcccttcctcagcatccacaggtcacgccacccctcttcttgtcaccgacacttcctcagcatccacaggacacgccacccctcttcctgtcaccgacgcttcctcagtgtccacagatcacgccacctctcttcctgtaaccatcccttccgcagcatccacaggtcacaccacccctcttcctgtcaccgacacttcctcagcatccacaggtcaggccacctctcttcttgtcaccgacacttcctcagtatccacaggtgacaccacgcctcttcctgtcactagcacttcctcagcatccacaggtcacgtcactcctcttcatgtcaccagcccttcctcagcatccacaggtcacgccacccctcttcctgtcaccagcctttcctcagcatccacaggtgacaccatgcctcttcctgtcactagcccttcctcagcatccacaggtgacaccacccctcttcctgtcaccgacgcttcctcagtatccacaggtcacaccacccctcttcctgtcaccagcccttcctcagcatctacaggtcacaccacccctcttcctgtcaccgacacttcctcagcatccaaaggtgacaccacccctcttcctgtcaccagcccttcctcagcatctacaggtcacaccacccctcttcctgtcaccgacacttcctcagcatccacaggtgacaccacccctcttcctgtcaccaatgcttcctcattatccacaggtcacgccacccctcttcatgtcaccagcccttcctcagcatccacaggtcacgccacccctcttcctgtcaccagcacttcctcagcatccaccggtcacgccacccctcttcctgtcaccggcctttcctcagctaccacagatgacaccacccgtcttcctgtcaccgacgtttcctcggcatccacaggtcaggccacccctcttcctgtcaccagcctttcctcagtatccacaggtgacaccacgcctcttcctgtcactagcccttcctcagcatccacaggtcacgccagccctcttcttgtcactgacgcttcctcagcatccacaggtcaggccacccctcttcctgtcaccgacacttcctcagtatccacagctcacgccaccccacttcctgtcaccggcctttcttcagcttccacagatgacaccacccgtcttcctgtcaccgacgtttcctcggcatccacaggtcaggccatccctcttcctgtcaccagcccttcctcagcatccacaggtgacaccacccctcttcctgtcaccgacgcttcctcagcatccacaggtgacaccacctctcttcctgtcaccatcccttcctcagcatcttcaggtcacaccacctctcttcctgtcaccgacgcttcctcagtgtccacaggtcacgccacctctcttcttgtcaccgacgcttcctcagtatccacaggtgacaccacccctcttcctgtcaccgacactaactcagcatccacaggtgacaccacccctcttcatgtcaccgacgcttcctcagtatccacaggtcacgccacctctcttcctgtcaccagcctttcctcagcatccacaggtgacaccacgcctcttcctgtcactagcccttcctcagcatcctcaggtcacaccacccctcttcctgtcaccgacgcttcctcagtacccacaggtcacgccacctctcttcctgtcaccgacgcttcctcagtgtccacaggtcacgccacccctcttcctgtcaccgacgcttcctcagtgtccacaggtcatgccacccctcttccggtcaccgacacttcctcagtatctacaggacaggccacccctcttcctgtcaccagcctttcctcagcatccactggtgacaccacgccgcttcctgtcaccgatacttcctcagcatccacaggtcaggacacccctcttcctgtcaccagcctttcctcagtatccacaggtgacaccacgcctcttcctgtcactaacccttcctcagcatccacaggtcacgccacccctcttcttgtcaccgacgcttcctcaatatccacaggtcacgccacctctcttcttgtcaccgacgcttcctcagtatccacaggtcacgccaccgctcttcatgacaccgatgcttcctcattatccacaggggacaccacccctcttcctgtcaccagcccttcctcaacatccacaggtgacaccacccctcttcctgtcaccgaaacttcctcagtatccacaggtcacgccacctctcttcctgtcaccgacacttcctcagcatccacaggtcacgccacctctcttcctgtcaccgacacttcctcagcatccacaggtcacgccacccctcttcctgtcaccgacacttcctcagcatccacaggtcaggccacccctcttcctgtcaccagcccttcctcagcatccacaggtcacgccatccctcttcttgtcaccgacacttcctcagcatccacaggacaggccacccctcttcctgtcaccagcctttcctcagcatccacaggtgacaccacccctcttcctgtcaccgacgcttcctcagtgtccacaggtcacgccacctctcttcctgtcaccagcctttcctcagtatccacaggtgacaccactcctcttcctgtcactagcccttcctcagcatccacaggtcacgccacccctcttcatgtcaccgacgcttcctcagcatccacaggtcacgccacccctcttcctgtcaccagcctttcctcagcatccacaggtgacaccacgcctcttcctgtcactagcccttcctcagcatccacaggtcacgccacccctcttcatgtcaccgacgcttcctcagtatccacaggtgacaccacccctcttcctgtcaccagctcttcctcagcatcctcaggtcacaccacccctcttcctgtcaccgacgcttcctcagcatccacaggtgacaccacccctcttcctgtcaccgacacttcctcagcatccacaggtcacgccacccatcttcctgtcaccggcctttcctcagcttccacaggtgacaccacccgtcttcctgtcaccaacgtttcctcggcatccacaggtcatgccacccctcttcctgtcaccagcacttcctcagcatccacaggtgacaccacccctcttcctggcaccgacacttcctcagtatccacaggtcacaccacccctcttcttgtcaccgacgcttcgtcagtatccacaggtgacaccacccgtcttcctgtcaccagcccttcctcagcatctacaggtcacaccacccctctacctgtcaccgacactccctcagcatccacaggtgacaccacccctcttcctgtcaccaatgcttcctcattatccacacgtcacgccacctctcttcatgtcaccagcccttcctcagcatccacaggtcacgccacctctcttcctgtcaccgacacttccgcagcatccacaggtcacgccacccctcttcctgtcaccagcacttcctcagcatccacaggtgacaccacccctcttcctgtcaccgacacttactcagcatccacaggtcaggccacccctcttcctgtcaccagcctttcctcagtatccacaggtgacaccacgcctcttcctgtcactagcccttcctcagcatccacaggtcacgccactcctcttcttgtcaccgacgcttcctcagcatccacaggtcaggccacccctcttcctgtcaccagcctttcctcagtatccacaggtgacaccacgcctcttcctgtcactagcccttcctcagcatccaccggtcatgccacctctcttcctgtcaccgacacttcctcagcatccacaggtgacaccacctctcttcctgtcaccgacacttcctcagcatacacaggtgacaccacctctcttcctgtcaccgacacttcctcatcatccacaggtgacaccacccctcttcttgtcaccgagacttcctcagtatccacaggtgacaccacccctcttcctgtcaccgacacttcctcagcatccacaggtcacgccacccctcttcctgtcaccaacacttcctcagtatccacaggtcacgccacccctcttcatgtcaccagcccttcctcagcatccacaggtcacaccacccctcttcctgtcaccgacgcttcgtcagtgtccacaggtcacgccacctctcttcctgtcaccgacgcttcctcagtgttcacaggtcatgccacctctcttcctgtcaccatcccttcctcagcatcctcaggtcacaccacccctcttcctgtcaccgacgcttcctcagtgtccacaggtcacgccacctctcttcctgtcaccgacgcttcctcagtgtccacaggtcatgccacccctcttcctgtcaccgacgcttcctcagtgtccacaggtcacgctacccctcttcctctcaccagcctttcctcagtatccacaggtgacaccacgcctcttcctgtcaccgacacttcctcagcatccacaggtcaggccacccctcttcctgtcaccagcctttcctcagtatccacaggtgacaccacccctcttcctgtcaccgacacttcctcagcatccacaggtcacgccacctctcttcctgtcaccgacacttcctcagcatccacaggtcacgccacccctcttcctgacaccgacacttcctcagcatccacaggtcacgccacccttcttcctgtcaccgacacttcctcagcatccataggtcacgccacctctcttcctgtcaccgacacttcctcaatatccacaggtcacgccacccctcttcatgtcaccagcccttcctcagcatccaccggtcacgccaccccgcttcctgtcaccgacacttcctcagcatccacaggtcacgccaaccctcttcatgtcaccagcccttcctcagcatccaccggtcacgccaccccgcttcctgtcaccgacacttcctcagcatccacaggtcacgccacccctcttcctgtcaccagcctttcctcagtatccacaggtgacaccacgcctcttcctgtcactagcccttcctcagcatccacaggtcacaccacccctcttcctgtcaccgacacttcctcagcatccacaggtcaggccaccgctcttcctgtcaccagcacttcctcagcatccacaggtgacaccacccctcttcctgtcaccgacacttcctcagcatccacaggtcaggccacccctcttcctgtcaccagcctttcctcagtatccacaggtgacaccacgcctcttcctgtcactagcccttcctcagcatccacaggtcacgccactcctcttcttgtcaccgacgcttcctcagcatccacaggtcaggccacccctcttcctgtcaccagcctttcctcagtatccacaggtgacaccacgcctcttcctgtcactagcccttcctcagcatccaccggtcatgccacctctcttcctgtcaccgacacttcctcagcatccacaggtgacaccacctctcttcctgtcaccgacacttcctcagcatacacaggtgacaccacctctcttcctgtcaccgacacttcctcatcatccacaggtgacaccacccctcttcttgtcaccgagacttcctcagtatccacaggtcacgccactcctcttcttgtcaccgacgcttcctcagcatccacaggtcacgccacccctcttcatgtcaccagcccttcctcagcatccacaggtgacaccacccctgtgcctgtcaccgacacttcctcagtatccacaggtcacgccacccctcttcctgtcaccggcctttcctcagcttccacaggtgacaccacccgtcttcctgtcaccgacatttcctcggcatccacaggtcaggccacccctcttcctgtcaccaacacttcctcagtatccacaggtgacaccatgcctcttcctgtcactagcccttcctcagcatccacaggtcacgccacccctcttcctgtcaccagcacttcctcagcatccaccggtcacgccacccctgttcctgtcaccagcacttcctcagcatctacaggtcacaccacccctcttcctgtcaccgacacttcctcagcatccacaggtgacaccacccctcttcctgtcaccagcccttcctcagcatctacaggtcacaccacccctcttcatgtcaccatcccttcctcagcatccacaggtgacaccagcactcttcctgtcaccggcgcttcctcagcatccaccggtcacgccacccctcttcctgtcaccgacacttcctcagtatccaccggtcacgccacgcctcttcctgtcaccagcctttcctcagtatccacaggtgacaccacccctcttcctgtcaccgacgcttcctcggcatccacaggtcaggccacccctcttcctgtcaccagcctttcctcagtatccacaggtgacaccacccctcttcttgtcaccgacgcttcctcagtatccacaggtcacgccacccctcttcctgtcaccgacacttcctcagcatccacaggtgacaccacccgtcttcctgtcacggacacttcctcagcatccacaggtcaggccacccctcttcctgtcaccagcctttcctcagtatccacaggtgacaccacccctcttcttgtcaccgacgcttcctcagtatccacaggtcacgccacccctcttcctgtcaccgacacttcctcagcatccacaggtgacaccacccgtcttcctgtcacggacacttcctcagcatccacaggtcaggccacccctcttcctgtcaccatcccttcctcatcatcctcaggtcacaccacccctcttcctgtcaccagcacttcctcagtatctacaggtcacgtcacccctcttcatgtcaccagcccttcctcagcatccacaggtcacgtcacccctcttcctgtcaccagcacttcctcagcatccacaggtcacgccacccctcttcttgtcaccgacgcttcctcagtgtccacaggtcacgccacgcctcttcctgtcaccgacgcttcctcagcatccacaggtgacaccacccctcttcctgtcaccgacacttcctcagcatccacaggtcaggccacccctcttcctgtcaccagcctttcctcagtatccacaggtgacaccacccctcttcctgtcaccgacgcttcctcagcatccacaggtcacgccacccctcttcctgtcaccatcccttcctcagtatccacaggtgacaccatgcctcttcctgtcactagcccttcctcagcatccacaggtcacgccacccctcttcctgttaccggcctttcctcagcttccacaggtgacaccacccctcttcctgtcaccgacacttcctcagcatccacacgtcacgccacccctcttcctgtcaccgacacttcctcagcttccacagatgacaccacccgtcttcctgtcaccgacgtttcctcggcatccacaggacatgccacccctcttcctgtcaccagcacttcctcagcatccacaggtgacaccacccctcttcctgtcaccgacacttcctcagtatccacaggtcacgccacctctcttcctgtcaccagccgttcctcagcatccacaggtcacgccaccccccttcctgtcaccgacacttcctcagtatccacaggtcacgccacccctcttcctgtcaccagcacttcctcagtatctacaggtcacgccacccctcttcctgtcaccagcccttcctcagcatccacaggtcacgccacccctgttcctgtcaccagcacttcctcagcatccacaggtgacaccacccctcttcctgtcaccaatgcttcctcattatccacaggtcacgccacccctcttcatgtcaccagcccttcctcagcatccagaggtgacaccagcactcttcctgtcaccgatgcttcctcagcatccaccggtcacgccacccctcttcctctcaccagcctttcctcagtatccacaggtgacaccacgcctcttcctgtcaccgacacttcctctgcatccacaggtcaggccacccctcttcctgtcaccagcctttcctcagtatccacaggtgacaccacgcctcttcctgtcaccatcccttcctcagcatcctcaggtcacaccacctctcttcctgtcaccgacgcttcctcagtgtccacaggtcacggcacccctcttcctgtcaccagcacttcctcagcatccacaggtgacaccacccctcttcctgtcaccgacacttcctcagcatccacaggtcacgccacccctcttcctgtcaccgacacttcctcagcatccacaggtcacgccacccctcttcctgtcaccagcctttcctcagtatccacaggtcacgccacccctcttgctgtcagcagtgctacctcagcttccacagtatcctcggactcccctctgaagatggaaacaccaggaatgacaacaccgtcactgaagacagacggtgggagacgcacagccacatcaccaccccccacaacctcccagaccatcatttccaccattcccagcactgccatgcacacccgctccacagctgcccccatccccatcctgcctgagagaggagtttccctcttcccctatggggcaggcgccggggacctggagttcgtcaggaggaccgtggacttcacctccccactcttcaagccggcgactggcttcccccttggctcctctctccgtgattccctctacttcacagacaatggccagatcatcttcccagagtcagactaccagattttctcctaccccaacccactcccaacaggcttcacaggccgggaccctgtggccctggtggctccgttctgggacgatgctgacttctccactggtcgggggaccacattttatcaggaatacgagacgttctatggtgaacacagcctgctagtccagcaggccgagtcttggattagaaagatgacaaacaacgggggctacaaggccaggtgggccctaaaggtcacgtgggtcaatgcccacgcctatcctgcccagtggaccctcgggagcaacacctaccaagccatcctctccacggacgggagcaggtcctatgccctgtttctctaccagagcggtgggatgcagtgggacgtggcccagcgctcaggcaacccggtgctcatgggcttctctagtggagatggctatttcgaaaacagcccactgatgtcccagccagtgtgggagaggtatcgccctgatagattcctgaattccaactcaggcctccaagggctgcagttctacaggctacaccgggaagaaaggcccaactaccgtctcgagtgcctgcagtggctgaagagccagcctcggtggcccagctggggctggaaccaggtctcctgcccttgttcctggcagcagggacgacgggacttacgattccaacccgtcagcataggtcgctggggcctcggcagtaggcagctgtgcagcttcacctcttggcgaggaggcgtgtgctgcagctacgggccctggggagagtttcgtgaaggctggcacgtgcagcgtccttggcagttggcccaggaactggagccacagagctggtgctgccgctggaatgacaagccctacctctgtgccctgtaccagcagaggcggccccacgtgggctgtgctacatacaggcccccacagcccgcctggatgttcggggacccccacatcaccaccttggatggtgtcagttacaccttcaatgggctgggggacttcctgctggtcggggcccaagacgggaactcctccttcctgcttcagggccgcaccgcccagactggctcagcccaggccaccaacttcatcgcctttgcggctcagtaccgctccagcagcctgggccccgtcacggtccaatggctccttgagcctcacgacgcaatccgtgtcctgctggataaccagactgtgacatttcagcctgaccatgaagacggcggaggccaggagacgttcaacgccaccggagtcctcctgagccgcaacggctctgaggtctcggccagcttcgacggctgggccaccgtctcggtgatcgcgctctccaacatcctccacgcctccgccagcctcccgcccgagtaccagaaccgcacggaggggctcctgggggtctggaataacaatccagaggacgacttcaggatgcccaatggctccaccattcccccagggagccctgaggagatgcttttccactttggaatgacctggcagatcaacgggacaggcctccttggcaagaggaatgaccagctgccttccaacttcacccctgttttctactcacaactgcaaaaaaacagctcctgggctgaacatttgatctccaactgtgacggagatagctcatgcatctatgacaccctggccctgcgcaacgcaagcatcggacttcacacgagggaagtcagtaaaaactacgagcaggcgaacgccaccctcaatcagtacccgccctccatcaatggtggtcgtgtgattgaagcctacaaggggcagaccacgctgattcagtacaccagcaatgctgaggatgccaacttcacgctcagagacagctgcaccgacttggagctctttgagaatgggacgttgctgtggacacccaagtcgctggagccattcactctggagattctagcaagaagtgccaagattggcttggcatctgcactccagcccaggactgtggtctgccattgcaatgcagagagccagtgtttgtacaatcagaccagcagggtgggcaactcctccctggaggtggctggctgcaagtgtgacgggggcaccttcggccgctactgcgagggctccgaggatgcctgtgaggagccgtgcttcccgagtgtccactgcgttcctgggaagggctgcgaggcctgccctccaaacctgactggggatgggcggcactgtgcggctctggggagctctttcctgtgtcagaaccagtcctgccctgtgaattactgctacaatcaaggccactgctacatctcccagactctgggctgtcagcccatgtgcacctgccccccagccttcactgacagccgctgcttcctggctgggaacaacttcagtccaactgtcaacctagaacttcccttaagagtcatccagctcttgctcagtgaagaggaaaatgcctccatggcagaagtcaacgcctcggtggcatacagactggggaccctggacatgcgggcctttctccgcaacagccaagtggaacgaatcgattctgcagcaccggcctcgggaagccccatccaacactggatggtcatctcggagttccagtaccgccctcggggcccggtcattgacttcctgaacaaccagctgctggccgcggtggtggaggcgttcttataccacgttccacggaggagtgaggagcccaggaacgacgtggtcttccagcccatctccggggaagacgtgcgcgatgtgacagccctgaacgtgagcacgctgaaggcttacttcagatgcgatggctacaagggctacgacctggtctacagcccccagagcggcttcacctgcgtgtccccgtgcagtaggggctactgtgaccatggaggccagtgccagcacctgcccagtgggccccgctgcagctgtgtgtccttctccatctacacggcctggggcgagcactgtgagcacctgagcatgaaactcgacgcgttcttcggcatcttctttggggccctgggcggcctcttgctgctgggggtcgggacgttcgtggtcctgcgcttctggggttgctccggggccaggttctcctatttcctgaactcagctgaggccttgccttgaaggggcagctgtggcctaggctacctcaagactcacctcatccttaccgcacatttaaggcgccattgcttttgggagactggaaaagggaaggtgactgaaggctgtcaggattcttcaaggagaatgaatactgggaatcaagacaagactataccttatccataggcgcaggtgcacagggggaggccataaagatcaaacatgcatggatgggtcctcacgcagacacacccacagaaggacactagcctgtgcacgcgcgcgtgcacacacacacacacacacacgagttcataatgtggtgatggccctaagttaagcaaaatgcttctgcacacaaaactctctggtttacttcaaattaactctatttaaataaagtctctctgactttttgtgtctccaaaaaaaaaaaaaaaaa

SEQ ID NO: 16 - DNA, 4111 bp, Homo sapiens
  misc_feature: Mucin 4 (isoform D)
ctcttttgtcctcttcccaggttccctggccccttcggagaaacgcacttggttcgggccagccgcctgaggggacgggctcacgtctgctcctcacactgcagctgctgggccgtggagcttccccagggagccagggggacttttgccgcagccatgaagggggcacgctggaggagggtcccctgggtgtccctgagctgcctgtgtctctgcctccttccgcatgtggtcccaggaatgacaacaccgtcactgaagacagacggtgggagacgcacagccacatcaccaccccccacaacctcccagaccatcatttccaccattcccagcactgccatgcacacccgctccacagctgcccccatccccatcctgcctgagagaggagtttccctcttcccctatggggcaggcgccggggacctggagttcgtcaggaggaccgtggacttcacctccccactcttcaagccggcgactggcttcccccttggctcctctctccgtgattccctctacttcacagacaatggccagatcatcttcccagagtcagactaccagattttctcctaccccaacccactcccaacaggcttcacaggccgggaccctgtggccctggtggctccgttctgggacgatgctgacttctccactggtcgggggaccacattttatcaggaatacgagacgttctatggtgaacacagcctgctagtccagcaggccgagtcttggattagaaagatgacaaacaacgggggctacaaggccaggtgggccctaaaggtcacgtgggtcaatgcccacgcctatcctgcccagtggaccctcgggagcaacacctaccaagccatcctctccacggacgggagcaggtcctatgccctgtttctctaccagagcggtgggatgcagtgggacgtggcccagcgctcaggcaacccggtgctcatgggcttctctagtggagatggctatttcgaaaacagcccactgatgtcccagccagtgtgggagaggtatcgccctgatagattcctgaattccaactcaggcctccaagggctgcagttctacaggctacaccgggaagaaaggcccaactaccgtctcgagtgcctgcagtggctgaagagccagcctcggtggcccagctggggctggaaccaggtctcctgcccttgttcctggcagcagggacgacgggacttacgattccaacccgtcagcataggtcgctggggcctcggcagtaggcagctgtgcagcttcacctcttggcgaggaggcgtgtgctgcagctacgggccctggggagagtttcgtgaaggctggcacgtgcagcgtccttggcagttggcccaggaactggagccacagagctggtgctgccgctggaatgacaagccctacctctgtgccctgtaccagcagaggcggccccacgtgggctgtgctacatacaggcccccacagcccgcctggatgttcggggacccccacatcaccaccttggatggtgtcagttacaccttcaatgggctgggggacttcctgctggtcggggcccaagacgggaactcctccttcctgcttcagggccgcaccgcccagactggctcagcccaggccaccaacttcatcgcctttgcggctcagtaccgctccagcagcctgggccccgtcacggtccaatggctccttgagcctcacgacgcaatccgtgtcctgctggataaccagactgtgacatttcagcctgaccatgaagacggcggaggccaggagacgttcaacgccaccggagtcctcctgagccgcaacggctctgaggtctcggccagcttcgacggctgggccaccgtctcggtgatcgcgctctccaacatcctccacgcctccgccagcctcccgcccgagtaccagaaccgcacggaggggctcctgggggtctggaataacaatccagaggacgacttcaggatgcccaatggctccaccattcccccagggagccctgaggagatgcttttccactttggaatgacctggcagatcaacgggacaggcctccttggcaagaggaatgaccagctgccttccaacttcacccctgttttctactcacaactgcaaaaaaacagctcctgggctgaacatttgatctccaactgtgacggagatagctcatgcatctatgacaccctggccctgcgcaacgcaagcatcggacttcacacgagggaagtcagtaaaaactacgagcaggcgaacgccaccctcaatcagtacccgccctccatcaatggtggtcgtgtgattgaagcctacaaggggcagaccacgctgattcagtacaccagcaatgctgaggatgccaacttcacgctcagagacagctgcaccgacttggagctctttgagaatgggacgttgctgtggacacccaagtcgctggagccattcactctggagattctagcaagaagtgccaagattggcttggcatctgcactccagcccaggactgtggtctgccattgcaatgcagagagccagtgtttgtacaatcagaccagcagggtgggcaactcctccctggaggtggctggctgcaagtgtgacgggggcaccttcggccgctactgcgagggctccgaggatgcctgtgaggagccgtgcttcccgagtgtccactgcgttcctgggaagggctgcgaggcctgccctccaaacctgactggggatgggcggcactgtgcggctctggggagctctttcctgtgtcagaaccagtcctgccctgtgaattactgctacaatcaaggccactgctacatctcccagactctgggctgtcagcccatgtgcacctgccccccagccttcactgacagccgctgcttcctggctgggaacaacttcagtccaactgtcaacctagaacttcccttaagagtcatccagctcttgctcagtgaagaggaaaatgcctccatggcagaagtcaacgcctcggtggcatacagactggggaccctggacatgcgggcctttctccgcaacagccaagtggaacgaatcgattctgcagcaccggcctcgggaagccccatccaacactggatggtcatctcggagttccagtaccgccctcggggcccggtcattgacttcctgaacaaccagctgctggccgcggtggtggaggcgttcttataccacgttccacggaggagtgaggagcccaggaacgacgtggtcttccagcccatctccggggaagacgtgcgcgatgtgacagccctgaacgtgagcacgctgaaggcttacttcagatgcgatggctacaagggctacgacctggtctacagcccccagagcggcttcacctgcgtgtccccgtgcagtaggggctactgtgaccatggaggccagtgccagcacctgcccagtgggccccgctgcagctgtgtgtccttctccatctacacggcctggggcgagcactgtgagcacctgagcatgaaactcgacgcgttcttcggcatcttctttggggccctgggcggcctcttgctgctgggggtcgggacgttcgtggtcctgcgcttctggggttgctccggggccaggttctcctatttcctgaactcagctgaggccttgccttgaaggggcagctgtggcctaggctacctcaagactcacctcatccttaccgcacatttaaggcgccattgcttttgggagactggaaaagggaaggtgactgaaggctgtcaggattcttcaaggagaatgaatactgggaatcaagacaagactataccttatccataggcgcaggtgcacagggggaggccataaagatcaaacatgcatggatgggtcctcacgcagacacacccacagaaggacactagcctgtgcacgcgcgcgtgcacacacacacacacacacacgagttcataatgtggtgatggccctaagttaagcaaaatgcttctgcacacaaaactctctggtttacttcaaattaactctatttaaataaagtctctctgactttttgtgtctccaaaaaaaaaaaaaaaaa

SEQ ID NO: 17 - DNA, 3958 bp, Homo sapiens
  misc_feature: Mucin 4 (isoform E)
ctcttttgtcctcttcccaggttccctggccccttcggagaaacgcacttggttcgggccagccgcctgaggggacgggctcacgtctgctcctcacactgcagctgctgggccgtggagcttccccagggagccagggggacttttgccgcagccatgaagggggcacgctggaggagggtcccctgggtgtccctgagctgcctgtgtctctgcctccttccgcatgtggtcccaggagtttccctcttcccctatggggcaggcgccggggacctggagttcgtcaggaggaccgtggacttcacctccccactcttcaagccggcgactggcttcccccttggctcctctctccgtgattccctctacttcacagacaatggccagatcatcttcccagagtcagactaccagattttctcctaccccaacccactcccaacaggcttcacaggccgggaccctgtggccctggtggctccgttctgggacgatgctgacttctccactggtcgggggaccacattttatcaggaatacgagacgttctatggtgaacacagcctgctagtccagcaggccgagtcttggattagaaagatgacaaacaacgggggctacaaggccaggtgggccctaaaggtcacgtgggtcaatgcccacgcctatcctgcccagtggaccctcgggagcaacacctaccaagccatcctctccacggacgggagcaggtcctatgccctgtttctctaccagagcggtgggatgcagtgggacgtggcccagcgctcaggcaacccggtgctcatgggcttctctagtggagatggctatttcgaaaacagcccactgatgtcccagccagtgtgggagaggtatcgccctgatagattcctgaattccaactcaggcctccaagggctgcagttctacaggctacaccgggaagaaaggcccaactaccgtctcgagtgcctgcagtggctgaagagccagcctcggtggcccagctggggctggaaccaggtctcctgcccttgttcctggcagcagggacgacgggacttacgattccaacccgtcagcataggtcgctggggcctcggcagtaggcagctgtgcagcttcacctcttggcgaggaggcgtgtgctgcagctacgggccctggggagagtttcgtgaaggctggcacgtgcagcgtccttggcagttggcccaggaactggagccacagagctggtgctgccgctggaatgacaagccctacctctgtgccctgtaccagcagaggcggccccacgtgggctgtgctacatacaggcccccacagcccgcctggatgttcggggacccccacatcaccaccttggatggtgtcagttacaccttcaatgggctgggggacttcctgctggtcggggcccaagacgggaactcctccttcctgcttcagggccgcaccgcccagactggctcagcccaggccaccaacttcatcgcctttgcggctcagtaccgctccagcagcctgggccccgtcacggtccaatggctccttgagcctcacgacgcaatccgtgtcctgctggataaccagactgtgacatttcagcctgaccatgaagacggcggaggccaggagacgttcaacgccaccggagtcctcctgagccgcaacggctctgaggtctcggccagcttcgacggctgggccaccgtctcggtgatcgcgctctccaacatcctccacgcctccgccagcctcccgcccgagtaccagaaccgcacggaggggctcctgggggtctggaataacaatccagaggacgacttcaggatgcccaatggctccaccattcccccagggagccctgaggagatgcttttccactttggaatgacctggcagatcaacgggacaggcctccttggcaagaggaatgaccagctgccttccaacttcacccctgttttctactcacaactgcaaaaaaacagctcctgggctgaacatttgatctccaactgtgacggagatagctcatgcatctatgacaccctggccctgcgcaacgcaagcatcggacttcacacgagggaagtcagtaaaaactacgagcaggcgaacgccaccctcaatcagtacccgccctccatcaatggtggtcgtgtgattgaagcctacaaggggcagaccacgctgattcagtacaccagcaatgctgaggatgccaacttcacgctcagagacagctgcaccgacttggagctctttgagaatgggacgttgctgtggacacccaagtcgctggagccattcactctggagattctagcaagaagtgccaagattggcttggcatctgcactccagcccaggactgtggtctgccattgcaatgcagagagccagtgtttgtacaatcagaccagcagggtgggcaactcctccctggaggtggctggctgcaagtgtgacgggggcaccttcggccgctactgcgagggctccgaggatgcctgtgaggagccgtgcttcccgagtgtccactgcgttcctgggaagggctgcgaggcctgccctccaaacctgactggggatgggcggcactgtgcggctctggggagctctttcctgtgtcagaaccagtcctgccctgtgaattactgctacaatcaaggccactgctacatctcccagactctgggctgtcagcccatgtgcacctgccccccagccttcactgacagccgctgcttcctggctgggaacaacttcagtccaactgtcaacctagaacttcccttaagagtcatccagctcttgctcagtgaagaggaaaatgcctccatggcagaagtcaacgcctcggtggcatacagactggggaccctggacatgcgggcctttctccgcaacagccaagtggaacgaatcgattctgcagcaccggcctcgggaagccccatccaacactggatggtcatctcggagttccagtaccgccctcggggcccggtcattgacttcctgaacaaccagctgctggccgcggtggtggaggcgttcttataccacgttccacggaggagtgaggagcccaggaacgacgtggtcttccagcccatctccggggaagacgtgcgcgatgtgacagccctgaacgtgagcacgctgaaggcttacttcagatgcgatggctacaagggctacgacctggtctacagcccccagagcggcttcacctgcgtgtccccgtgcagtaggggctactgtgaccatggaggccagtgccagcacctgcccagtgggccccgctgcagctgtgtgtccttctccatctacacggcctggggcgagcactgtgagcacctgagcatgaaactcgacgcgttcttcggcatcttctttggggccctgggcggcctcttgctgctgggggtcgggacgttcgtggtcctgcgcttctggggttgctccggggccaggttctcctatttcctgaactcagctgaggccttgccttgaaggggcagctgtggcctaggctacctcaagactcacctcatccttaccgcacatttaaggcgccattgcttttgggagactggaaaagggaaggtgactgaaggctgtcaggattcttcaaggagaatgaatactgggaatcaagacaagactataccttatccataggcgcaggtgcacagggggaggccataaagatcaaacatgcatggatgggtcctcacgcagacacacccacagaaggacactagcctgtgcacgcgcgcgtgcacacacacacacacacacacgagttcataatgtggtgatggccctaagttaagcaaaatgcttctgcacacaaaactctctggtttacttcaaattaactctatttaaataaagtctctctgactttttgtgtctccaaaaaaaaaaaaaaaaa

SEQ ID NO: 18 - DNA, 22824 bp, Homo sapiens
  misc_feature: Mucin 4 (isoform F)
ctcttttgtcctcttcccaggttccctggccccttcggagaaacgcacttggttcgggccagccgcctgaggggacgggctcacgtctgctcctcacactgcagctgctgggccgtggagcttccccagggagccagggggacttttgccgcagccatgaagggggcacgctggaggagggtcccctgggtgtccctgagctgcctgtgtctctgcctccttccgcatgtggtcccaggaaccacagaggacacattaataactggaagtaaaactcctgccccagtcacctcaacaggctcaacaacagcgacactagagggacaatcaactgcagcttcttcaaggacctctaatcaggacatatcagcttcatctcagaaccaccagactaagagcacggagaccaccagcaaagctcaaaccgacaccctcacgcagatgatgacatcaactcttttttcttccccaagtgtacacaatgtgatggagactgttacgcaggagacagctcctccagatgaaatgaccacatcatttccctccagtgtcaccaacacactcatgatgacatcaaagactataacaatgacaacctccacagactccactcttggaaacacagaagagacatcaacagcaggaactgaaagttctaccccagtgacctcagcagtctcaataacagctggacaggaaggacaatcacgaacaacttcctggaggacctctatccaagacacatcagcttcttctcagaaccactggactcggagcacgcagaccaccagggaatctcaaaccagcaccctaacacacagaaccacttcaactccttctttctctccaagtgtacacaatgtgacagggactgtttctcagaagacatctccttcaggtgaaacagctacctcatccctctgtagtgtcacaaacacatccatgatgacatcagagaagataacagtgacaacctccacaggctccactcttggaaacccaggggagacatcatcagtacctgttactggaagtcttatgccagtcacctcagcagccttagtaacagttgatccagaaggacaatcaccagtaactttctcaaggacttctactcaggacacaacagctttttctaagaaccaccagactcagagcgtggagaccaccagagtatctcaaatcaacaccctcaacaccctcacaccggttacaacatcaactgttttatcctcaccaagtggattcaacccaagtggaacagtttctcaggagacattcccttctggtgaaacaaccatctcatccccttccagtgtcagcaatacattcctggtaacatcaaaggtgttcagaatgccaatctccagagactctactcttggaaacacagaggagacatcactatctgtaagtggaaccatttctgcaatcacttccaaagtttcaaccatatggtggtcagacactctgtcaacagcactctcccccagttctctacctccaaaaatatccacagctttccacacccagcagagtgaaggtgcagagaccacaggacggcctcatgagaggagctcattctctccaggtgtgtctcaagaaatatttactctacatgaaacaacaacatggccttcctcattctccagcaaaggccacacaacttggtcacaaacagaactgccctcaacatcaacaggtgctgccactaggcttgtcacaggaaatccatctacaggggcagctggcactattccaagggtcccctctaaggtctcagcaataggggaaccaggagagcccaccacatactcctcccacagcacaactctcccaaaaacaacaggggcaggcgcccagacacaatggacacaagaaacggggaccactggagaggctcttctcagcagcccaagctacagtgtgactcagatgataaaaacggccacatccccatcttcttcacctatgctggatagacacacatcacaacaaattacaacggcaccatcaacaaatcattcaacaatacattccacaagcacctctcctcaggaatcaccagctgtttcccaaaggggtcacactcaagccccgcagaccacacaagaatcacaaaccacgaggtccgtctcccccatgactgacaccaagacagtcaccaccccaggttcttccttcacagccagtgggcactcgccctcagaaattgttcctcaggacgcacccaccataagtgcagcaacaacctttgccccagctcccaccggggatggtcacacaacccaggccccgaccacagcactgcaggcagcacccagcagccatgatgccaccctggggccctcaggaggcacgtcactttccaaaacaggtgcccttactctggccaactctgtagtgtcaacaccagggggcccagaaggacaatggacatcagcctctgccagcacctcacctgacacagcagcagccatgacccatacccaccaggctgagagcacagaggcctctggacaaacacagaccagcgaaccggcctcctcagggtcacgaaccacctcagcgggcacagctaccccttcctcatccggggcgagtggcacaacaccttcaggaagcgaaggaatatccacctcaggagagacgacaaggttttcatcaaacccctccagggacagtcacacaacccagtcaacaaccgaattgctgtccgcctcagccagtcatggtgccatcccagtaagcacaggaatggcgtcttcgatcgtccccggcacctttcatcccaccctctctgaggcctccactgcagggagaccgacaggacagtcaagcccaacttctcccagtgcctctcctcaggagacagccgccatttcccggatggcccagactcagaggacaagaaccagcagagggtctgacactatcagcctggcgtcccaggcaaccgacaccttctcaacagtcccacccacacctccatcgatcacatccagtgggcttacatctccacaaacccagacccacactctgtcaccttcagggtctggtaaaaccttcaccacggccctcatcagcaacgccacccctcttcctgtcacctacgcttcctcggcatccacaggtcacaccacccctcttcatgtcaccgatgcttcctcagtatccacaggtcacgccacccctcttcctgtcaccgacacttcctcagaatccacaggtcacgccacccctcttcctgtcaccagcccttcctcagtatccacaggtcacaccacccctcttcctgtcaccgacacttcctcagaatccacaggtcatgtcacccctcttcctgtcaccagcctttcctcagcatccacaggtgacagcacccctcttcctgtcactgacacttcctcagcatccacaggtcacgtcacccctcttcctgtcaccagcctttcctcagcatccacaggtgacaccacccctcttcctgtcactgacacttcctcagcatccacaggtcacgccacctctcttcctgtcaccgacacttcctcagtatccacaggtcacaccacccctcttcctgtcaccgacacttcctcagcatccacaggtcacgccacctctcttcctgtcaccgacacttcctcagtatccacagctcacgccaccccacttcctgtcaccggcctttcttcagcttccacagatgacaccacccgtcttcctgtcaccgacgtttcctcggcatccacaggtcaggccatccctcttcctgtcaccagcccttcctcagcatccacaggtgacaccacccctcttcctgtcaccgacgcttcctcagcatccacaggtgacaccacctctcttcctgtcaccatcccttcctcagcatcttcaggtcacaccacctctcttcctgtcaccgacgcttcctcagtgtccacaggtcacgccacctctcttcttgtcaccgacgcttcctcagtatccacaggtgacaccacccctcttcctgtcaccgacactaactcagcatccacaggtgacaccacccctcttcatgtcaccgacgcttcctcagtatccacaggtcacgccacctctcttcctgtcaccagcctttcctcagcatccacaggtgacaccacgcctcttcctgtcactagcccttcctcagcatcctcaggtcacaccacccctcttcctgtcaccgacgcttcctcagtacccacaggtcacgccacctctcttcctgtcaccgacgcttcctcagtgtccacaggtcacgccacccctcttcctgtcaccgacgcttcctcagtgtccacaggtcatgccacccctcttccggtcaccgacacttcctcagtatctacaggacaggccacccctcttcctgtcaccagcctttcctcagcatccactggtgacaccacgccgcttcctgtcaccgatacttcctcagcatccacaggtcaggacacccctcttcctgtcaccagcctttcctcagtatccacaggtgacaccacgcctcttcctgtcactagcccttcctcagcatccacaggtcacgccacccctcttcttgtcaccgacgcttcctcagtatccacaggtcacgccacctctcttcttgtcaccgacgcttcctcagtatccacaggtcacgccaccgctcttcatgtcaccgatgcttcctcattatccacaggggacaccacccctcttcctgtcaccagcccttcctcagcatccacaggtgacaccacccctcttcctgtcaccgacacttcctcagcatccacaggtcacgccacctctcttcctgtcaccgacacttcctcagcatccacaggtcacgccacccctcttcctgtcaccgacacttcctcagcatccacaggtcaggccacccctcttcctgtcaccggcccttcctcagcatccacaggtcacgccatccctcttcttgtcaccgacacttcctcagcatccacaggacaggccacccctcttcctgtcaccagcctttcctcagcatccacaggtgacaccacccctcttcctgtcaccgacgcttcctcagtgtccacaggtcacgccacctctcttcctgtcaccagcctttcctcagtatccacaggtgacaccacccctcttcctgtcaccagcccttcctcagcatcctcaggtcacaccacccctcttcctgtcaccgacgcttcctcagtatccacaggtgacaccacccctcttcctgtcaccagcccttcctcagcatcctcaggtcacaccacccctcttcctgtcaccagcccttcctcagcatcctcaggtcacaccacccctcttcctgtcaccgacgcttcctcagcatccacaggtgacaccacccctcttcctgtcaccgacacttcctcagcatccacaggtcacgccacccatcttcctgtcaccggcctttcctcagcttccacaggtgacaccacccgtcttcctgtcaccaacgtttcctcggcatccacaggtcatgccacccctcttcctgtcaccagcacttcctcagcatccacaggtgacaccacccctcttcctggcaccgacacttcctcagtatccacaggtcacaccacccctcttcttgtcaccgacgcttcgtcagtatccacaggtgacaccacccgtcttcctgtcaccagcccttcctcagcatctacaggtcacaccacccctctacctgtcaccgacactccctcagcatccacaggtgacaccacccctcttcctgtcaccaatgcttcctcattatccacacgtcacaccacctctcttcatgtcaccagcccttcctcagcatccacaggtcacgccacctctcttcctgtcaccgacacttcctcagtatccacaggtcatgccacccctcttcatgtcaccagcccttcctcagcatccacaggtgacaccacccctcttcctgtcaccgacacttactcagcatccacaggtcaggccacccctcttcctgtcaccgacacttcctcagcatccacaggtgacaccacccctcttcctgtcaccgacacttcctcagcatccacaggtcacgccacccctcttcctgtcaccaacacttcctcagtatccacaggtcacgccacccctcttcatgtcaccagcccttcctcagcatccacaggtcacaccacccctcttcctgtcaccgacgcttcgtcagtgtccacaggtcacgccacctctcttcctgtcaccgacgcttcctcagtgttcacaggtcacgccacctcgcttcctgtcaccatcccttcctcagcatcctcaggtcacaccacccctcttcctgtcaccgacgcttcctcagtgtccacaggtcacgccacctctcttcctgtcaccgacgcttcctcagtgtccacaggtcacgccacccctcttcctgtcaccgacgcttcctcagtgtccacaggtcacgctacccctcttcctgtcaccgacacttcctcagtatccacaggtcacgccacccctcttcctctcaccagcctttcctcagtatccacaggtgacaccacgcctcttcctgtcaccgacacttcctcagcatccacaggtcaggccacccctcttcctgtcaccagcctttcctcagtatccacaggtgacaccacccctcttcctgtcaccgacacttcctcagcatccacaggtcacgccacctctcttcctgtcaccgacacttcctcagcatccacaggtcacgccacccctcttcctgacaccgacacttcctcagcatccacaggtcacgccacccctcttcctgtcaccgacacttcctcagcatccacaggtcacgccacccttcttcctgtcaccgacacttcctcagcatccataggtcacgccacccctcttcctgtcaccgacacttcctcaatatccacaggtcacgccacccctcttcatgtcaccagcccttcctcagcatccaccggtcacgccaccccgcttcctgtcaccgacacttcctcagcatccacaggtcacgccaaccctcttcatgtcaccagcccttcctcagcatccaccggtcacgccaccccgcttcctgtcaccgacacttcctcagcatccacaggtcacgccacccctcttcctgtcaccagcctttcctcagtatccacaggtgacaccacgcctcttcctgtcactagcccttcctcagcatccacaggtcacaccacccctcttcctgtcaccgacacttcctcagcatccacaggtcaggccaccgctcttcctgtcaccagcacttcctcagcatccacaggtgacaccacccctcttcctgttaccgacacttcctcagcatccacaggtcaggccacccctcttcctgtcaccagcctttcctcagtatccacaggtgacaccacgcctcttcctgtcactagcccttcctcagcatccacaggtcacgccactcctcttcttgtcaccgacgcttcctcagcatccacaggtcaggccacccctcttcctgtcaccgacacttcctcagcatacacaggtgacaccacctctcttcctgtcaccgacacttcctcatcatccacaggtgacaccacccctcttcttgtcaccgagacttcctcagcatccacaggtcacgccacccctcttcatgtcaccagcccttcctcagcatccacaggtgacaccacccctgtgcctgtcaccgacacttcctcagtatccacaggtcacgccacccctcttcctgtcaccggcctttcctcagcttccacaggtgacaccacccgtcttcctgtcaccgacatttcctcggcatccacaggtcaggccacccctcttcctgtcaccaacacttcctcagcatccacaggtcacgccacccctcttcctgtcaccggcctttcctcagcttccacaggtgacaccacccgtcttcctgtcaccgacatttcctcggcatccacaggtcaggccacccctcttcctgtcaccaacacttcctcagtatccacaggtgacaccatgcctcttcctgtcactagcccttcctcagcatccacaggtcacgccacccctcttcctgtcaccagcacttcctcagcatccaccggtcacgccacccctgttcctgtcaccagcacttcctcagcatctacaggtcacaccacccctcttcctgtcaccgacacttcctcagcatccacaggtgacaccacccctcttcctgtcaccagcccttcctcagcatctacaggtcacaccacccctcttcatgtcaccatcccttcctcagcatccacaggtgacaccagcactcttcctgtcaccggcgcttcctcagcatccaccggtcacgccacccctcttcctgtcaccgacacttcctcagtatccacaggtcacgccacccctcttcctgtcaccagcttttcctcagtatccacaggtgacaccacgcctcttcctgtcaccgacacttcctcagtatccacaggtcacgccacccctcttcctgtcaccagcttttcctcagtatccacaggtgacaccacccctcttcctgtcaccgacgcttcctcggcatccaccggtcacgccacccctcttcctgtcaccgacacttcctcagtatccacaggtcacgccacccctcttcctctcaccagcctttcctcagtatccacaggtgacaccacgactcttcctgtcaccgacacttcctcagtatccacaggtcacgccacccctcttcctgtcaccagcttttcctcagtatccacaggtgacaccacccctcttcctgtcaccgacgcttcctcggcatccaccggtcacgccacccctcttcctgtcaccgacacttcctcagtatccaccggtcacgccacgcctcttcctgtcaccagcctttcctcagtatccacaggtgacaccacccctcttcctgtcaccgacgcttcctcggcatccacaggtcaggccacccctcttcctgtcaccagcctttcctcagtatcaacaggtgacaccacgcctcttcctgtcaccatcccttcctcagcatcctcaggtcacaccacctctcttcctgtcaccgacacttcctcagcatccacaggtcaggccacccctcttcctgtcaccagcctttcctcagtatccacaggtgacaccacccctcttcttgtcaccgacgcttcctcagtatccacaggtcacgccacccctcttcctgtcaccgacacttcctcagcatccacaggtgacaccacccgtcttcctgtcacagacacttcctcagcatccacaggtcaggccacccctcttcctgtcaccagcctttcctcagtatccacaggtgacaccacccctcttcttgtcaccaacacttcctcagtatccagaggtcacgccacctctcttcctgtcaccatcccttcctcatcatcctcaggtcacaccacccctcttcctgtcaccagcacttcctcagtatctacaggtcacgtcacccctcttcctgtcaccagcacttcctcagcatccacaggtcacgccacctctcttcctgtcaccgacacttcctcagtatccacaggtcacgccacctctcttcctgtcaccgacacttcctcagtatccacaggtcacgccacccctcttcctgtcaccgacgcttcctcagtgtccacaggtcacgccacgcctcttcctgtcaccgacgcttcctcagcatccacaggtgacaccacccctcttcctgtcaccaacacttcctcagcatccacaggtcaggccacccctcttcctgtcaccagcctttcctcagtatccacaggtgacaccatgcctcttcctgtcactagcccttcctcagcatccacaggtcacgccacccctcttcctgttaccggcctttcctcagcttccacaggtgacaccacccctcttcctgtcactgacacttcctcagcatccacaggtcacgtcacccctcttcctgtcaccagcctttcctcagcatccacaggtgacagcacccctcttcctgtcactgacacttcctcagcatccacaggtcacgtcacccctcttcctgtcaccagcctttcctcagcatccacaggtgacaccacccctcttcctgtcactgacacttcctcagcatccacaggtcacgccacccctcttcatgtcactgatgcttcctcagcatccacaggtcaggccacccttcttcctgtcaccagcctttcctcagtatccacaggtgacaccacgcctcttcctgtcactagcccttcctcagcatccacaggtcacgccacccctcttcttgtcaccgacacttcctcagcatccacaggacacgccacccctcttcctgtcacggacgcttcctcagtgtccacaggtcacgccacctctcttcctgtaaccatccgttcctcaggttccacaggtcacaccacccctcttcctgtcaccgacacttcctcagcatccacaggtcaggccacctctcttcttgtcaccgacacttcctcagtatccacaggtgacaccacgcctcttcctgtcactagcacttcctcagcatccacaggtcacgtcactcctcttcatgtcaccagcccttcctcagcatccacaggtcacgccacccctcttcctgtcaccagcctttcctcagcatccacaggtgacaccatgcctcttcctgtcactagcccttcctcagcatccacaggtgacaccacccctcttcctgtcaccgacgcttcctcagtatccacaggtcacaccacccctcttcctgtcaccagcccttcctcagcatctacaggtcacaccacccctcttcctgtcaccgacactacctcagcatccaaaggtgacaccacccctcttcctgtcaccagcccttcctcagcatctacaggtcacaccacccctcttcctgtcaccgacacttcctcagcatccacaggtgacaccacccctcttcctgtcaccagcccttcctcagcatccacaggtcacgccacccctcttcctgtcaccaatgcttcctcattatccacaggtcacgccacccctcttcatgtcaccagcccttcctcagcatccacaggtcacgccacccctcttcctgtcaccagcacttcctcagcatccaccggtcacgccacctctcttcctgtcaccagcacttcctcagcatccaccggtcacgccacccctcttcctgtcaccgacaattcctcagtatccacaggtcacgccacccctcttcctgtcaccggcctttcctcagctaccacagatgacaccacccgtcttcctgtcaccgacgtttcctcggcatccacaggtcaggccacccctcttcctgtcaccagcctttcctcagtatccacaggtgacaccacgcctcttcctgtcactagcccttcctcagcatccacaggtcacgccagccctcttcttgtcactgacgcttcctcagcatccacaggtcaggccacccctcttcctgtcaccgacacttcctcagtatccacagctcacgccaccccacttcctgtcaccggcctttcttcagcttccacagatgacaccacccgtcttcctgtcaccgacgtttcctcggcatccacaggtcaggccatccctcttcctgtcaccagcccttcctcagcatccacaggtgacaccacccctcttcctgtcaccgacgcttcctcagcatccacaggtgacaccacctctcttcctgtcaccatcccttcctcagcatcttcaggtcacaccacctctcttcctgtcaccgacgcttcctcagtgtccacaggtcacgccacctctcttcttgtcaccgacgcttcctcagtatccacaggtgacaccacccctcttcctgtcaccgacactaactcagcatccacaggtgacaccacccctcttcatgtcaccgacgcttcctcagtatccacaggtcacgccacctctcttcctgtcaccagcctttcctcagcatccacaggtgacaccacgcctcttcctgtcactagcccttcctcagcatcctcaggtgacaccacccctcttcctgtcaccgacacttcctcagcatccacaggtcacgccacccatcttcctgtcaccggcctttcctcagcttccacaggtgacaccacccgtcttcctgtcaccaacgtttcctcggcatccacaggtcatgccacccctcttcctgtcaccagcacttcctcagcatccacaggtgacaccacccctcttcctggcaccgacacttcctcagtatccacaggtcacaccacccctcttcttgtcaccgacgcttcgtcagtatccacaggtgacaccacccgtcttcctgtcaccagcccttcctcagcatctacaggtcacaccacccctcttcatgtcaccgatgcttcctcagtatccacaggtcacaccacccctcttcctgtcaccgacacttcctcagcatccacaggtcaggccacctctcttcttgtcaccgacacttcctcagtatccacaggtgacaccacgcctcttcctgtcactagcacttcctcagcatccacaggtcacgtcactcctcttcatgtcaccagcccttcctcagcatccacaggtcacgccacccctcttcctgtcaccagcctttcctcagcatccacaggtgacaccacccctcttcctgtcaccgacacttcctcagtatccacaggtcacaccacccctcttcctgtcaccagcccttcctcagcatctacaggtcacaccacccctcttcctgtcaccgacacttcctcagcatccaaaggtgacaccacccctcttcctgtcaccagcccttcctcagcatctacaggtcacaccacccctcttcctgtcaccgacacttcctcagcatccacaggtgacaccacccctcttcctgtcaccaatgcttcctcattatccacaggtcacgccacccctcttcatgtcaccagcccttcctcagcatccacaggtcacgccacccctcttcctgtcaccagcacttcctcagcatccaccggtcacgccacccctcttcctgtcaccagcacttcctcagcatccaccggtcacgccacccctcttcctgtcaccgacaattcctcagtatccacaggtcatgccacccctcttcctgtcaccggcctttcctcagctaccacagatgacaccacccgtcttcctgtcaccgacgtgtcctcggcatccacaggtcaggccacccctcttcctgtcaccagcctttcctcagtatccacaggtgacaccacgcctcttcctgtcactagcccttcctcagcatccacaggtcacgccagccctcttcttgtcactgacgcttcctcagcatccacaggtcaggccacccctcttcctgtcaccgacacttcctcagtatccacagctcacgccaccccacttcctgtcaccggcctttcctcagcttccacagatgacaccacccgtcttcctgtcaccgacgtttcctcggcatccacaggtcaggccatccctcttcctgtcaccagcccttcctcagcatccacaggtgacaccacccctcttcctgtcaccgacgcttcctcagcatccacaggtgacaccacctctcttcctgtcaccatcccttcctcagcatcttcaggtcacaccacctctcttcctgtcaccgacgcttcctcagtgtccacaggtcacgccacctctcttcttgtcaccgacgcttcctcagtatccacaggtgacaccacccctcttcctgtcaccgacactaactcagcatccacaggtgacaccacccctcttcatgtcaccgacgcttcctcagtatccacaggtcacgccacctctcttcctgtcaccagcctttcctcagcatccacaggtgacaccacgcctcttcctgtcactagcccttcctcagcatcctcaggtcacaccacctctcttcctgtcaccgacgcttcctcagtgtccacaggtcacgccacctctcttcctgtcaccatcccttcctcagcatcctcaggtcacaccacccctcttcctgtcaccgacgcttcctcagtacccacaggtcacgccacctctcttcctgtcaccgacgcttcctcagtgtccacaggtcacgccacccctcttcctgtcaccgacgcttcctcagtgtccacaggtcatgccacccctcttccggtcaccgacacttcctcagtatctacaggacaggccacccctcttcctgtcaccagcctttcctcagcatcatccactggtgacaccacgccgcttcctgtcactgatacttcctcagcatccacaggtcaggacacccctcttcctgtcaccagccttttctcagtatccacaggtgacaccacgcctcttcctgtcactagcccttcctcagcatccacaggtcacgccacccatcttcttgtcaccgacgcttcctcagtatccacaggtcacgccacctctcttcttgtcaccgacgcttcctcagtatccacaggtcacgccaccgctcttcatgtcaccgatgcttcctcattatccacaggggacaccacccctcttcctgtcaccagcccttcctcagcatccacaggtgacaccacccctcttcctgtcaccgacacttcctcagtatccacaggtcacgccacctctcttcctgtcactgacacttcctcagcatccacaggtcacgccacctctcttcctgtcaccgacacttcctcagcatccacaggtcaggccacccctcttcctgtcaccagcccttcctcagcatccacaggtcacgccatccctcttcttgtcaccgacacttcctcagcatccacaggacaggccacccctcttcctgtcaccagcctttcctcagcatccacaggtgacaccacccctcttcctgtcaccgatgcttcctcagtgtccacaggtcacgccacctctcttcctgtcaccagcctttcctcagtatccacaggtgacaccacccctcttcctgtcactagcccttcctcagcatccacaggtcacgccacccctcttcatgtcaccagcccttcctcagcatccacaggtcacgccacccctcttcctgtcaccagcctttcctcagcatccacaggtgacaccacgcctcttcctgtcactagcccttcctcagcatccacaggtcacgccacccctcttcatgtcaccgacgcttcctcagtatccacaggtgacaccacccctcttcctgtcaccagcccttcctcagcatcctcaggtcacaccacccctcttcctgtcaccgacgcttcctcagcatccacaggtgacaccacccctcttcctgtcaccgacacttcctcagcatccacaggtcacgccacccatcttcctgtcaccggcctttcctcagcttccacaggtgacaccacccgtcttcctgtcaccgacgtttcctcggcatccacaggtcatgccacccctcttcctgtcaccagcacttcctcagcatccacaggtgacaccacccctcttcctggcaccgacacttcctcagtatccacaggtcacaccacccctcttcttgtcaccgacgcttcgtcagtatccacaggtgacaccacccgtcttcctgtcaccagcccttcctcagcatctacaggtcacaccacccctctacctgtcaccgacactccctcagcatccacaggtgacaccacccctcttcctgtcaccaatgcttcctcattatccacacgtcacgccacctctcttcatgtcaccagcccttcctcagcatccaccggtcacgccacccctcttcctgttaccgacacttccgcagcatccacaggtcacgccacccctcttcctgtcaccagcacttcctcagcatccacaggtgacaccacccctcttcctgtcaccgacacttcctcagcatccacaggtcacgccacccctcttcctgtcaccaacacttcctcagtatccacaggtcacgccacccctcttcatgtcaccagcccttcctcagcatccacaggtcacaccacccctcttcctgtcaccgacgcttcgtcagtgtccacaggtcacgccacctctcttcctgtcaccgacgcttcctcagtgtccacaggtcacgccacccctcttcctgtcaccgacgcttcctcagtgtccacaggtcacgctacccctcttcctctcaccagcctttcctcagtatccacaggtgacaccacgcctcttcctgtcaccgacacttcctcagcatccacaggtcaggccacccctcttcctgtcaccagcctttcctcagtatccacaggtgacaccacccctcttcctgtcaccgacacttcctcagcatccacaggtcacgccacctctcttcctgtcaccgacacttcctcagcatccacaggtcacgccacccctcttcctgtcaccgacacttcctcaatatccacaggtcacgccacccctcttcatgtcaccagcccttcctcagcatccaccggtcacgccaccccgcttcctgtcaccgacacttcctcagcatccacaggtcacgccacccctcttcctgtcaccagcctttcctcagtatccacaggtgacaccacgcctcttcctgtcactagcccttcctcagcatccacaggtcacgccactcctcttcttgtcaccgacgcttcctcagcatccacaggtcaggccacccctcttcctgtcaccagcctttcctcagtatccacaggtgacaccacgcctcttcctgtcactagcccttcctcagcatccaccggtcatgccacctctcttcctgtcaccgacacttcctcagcatccacaggtgacaccacctctcttcctgtcaccgacacttcctcagcatacacaggtgacaccacctctcttcctgtcaccgacacttcctcatcatccacaggtgacaccacccctcttcttgtcaccgagacttcctcagcatccacaggtgacaccacccctgtgcctgtcaccgacacttcctcagtatccacaggtcacgccacccctcttcctgtcaccggcctttcctcagcttccacaggtgacaccacccgtcttcctgtcaccgacatttcctcggcatccacaggtcaggccacccctcttcctgtcaccaacacttcctcagtatccacaggtgacaccatgcctcttcctgtcactagcccttcctcagcatccacaggtcacgccacccctcttcctgtcaccagcacttcctcagcatccaccggtcacgccacccctgttcctgtcaccagcacttccttagcatccacaggtcacaccacccctcttcctgtcaccagcccttcctcagcatctacaggtcacaccacccctcttcctgtcaccgacacttcctcagcatccacaggtgacaccacccctcttcctgtcaccaatgcttcctcattatccacaggacacaccacccctcttcatgtcaccatcccttcctcagcatccacaggtgacaccagcactcttcctgtcaccggcgcttcctcagcatccaccggtcacgccacccctcttcctgtcaccgacacttcctcagtatccacaggtcacgccacccctcttcctgtcaccagcttttcctcagtatccacaggtgacaccacccctcttcctgtcaccgacgcttcctcggcatccaccggtcacgccacccctcttcctgtcaccgacacttcctcagcatccacaggtgacaccacccctcttcctgtcaccgacgcttcctcggcatccacaggtcaggccacccctcttcctgtcaccagcctttcctcagtatcaacaggtgacaccacgcctcttcctgtcaccatcccttcctcagcatcctcaggtcacaccacctctcttcctgtcagcgacacttcctcagcatccacaggtcaggccacccctcttcctgtcaccagcctttcctcagtatccacaggtgacaccacccctcttcttgtcaccgacgcttcctcagtatccacaggtcacgccacccctcttcctgtcaccgacacttcctcagcatccacaggtgacaccacccgtcttcctgtcacggacacttcctcagcatccacaggtcaggccacccctcttcctgtcaccagcctttcctcagtatccacaggtgacaccacccctcttcttgtcaccaacacttcctcagtatccacaggtcacgccacctctcttcctgtcaccatcccttcctcatcatcctcaggtcacaccacccctcttcctgtcaccagcacttcctcagtatctacaggtcacgtcacccctcttcatgtcaccagcccttcctcatcatccacaggtcaggccacccctcttcctgtcaccagcacttcctcagtatctacaggtcacgtcacccctcttcatgtcaccagcccttcctcagcatccacaggtcacgccacccctcttcctgtcaccagcacttcctcagcatccacaggtcacgccacccctcttcctgtcaccgacgcttcctcagtgtccacaggtcacgccacgcctcttcctgtcaccgacacttcctcagcatccacaggtgacaccacccctcttcctgtcaccgacacttcctcagcatccacaggtcaggccacccctcttcctgtcaccagcctttcctcagtatccacaggtcacgccacccctcttgctgtcagcagtgctacctcagcttccacagtatcctcggactcccctctgaagatggaaacatcaggaatgacaacaccgtcactgaagacagacggtgggagacgcacagccacatcaccaccccccacaacctcccagaccatcatttccaccattcccagcactgccatgcacacccgctccacagctgcccccatccccatcctgcctgagagaggagtttccctcttcccctatggggcagacgccggggacctggagttcgtcaggaggaccgtggacttcacctccccactcttcaagccggcgactggcttcccccttggctcctctctccgtgattccctctacttcacagacaatggccagatcatcttcccagagtcagactaccagattttctcctaccccaacccactcccaacaggcttcacaggccgggaccctgtggccctggtggctccgttctgggacgatgctgacttctccactggtcgggggaccacattttatcaggaatacgagacgttctatggtgaacacagcctgctagtccagcaggccgagtcttggattagaaagatgacaaacaacgggggctacaaggccaggtgggccctaaaggtcacgtgggtcaatgcccacgcctatcctgcccagtggaccctcgggagcaacacctaccaagccatcctctccacggacgggagcaggtcctatgccctgtttctctaccagagcggtgggatgcagtgggacgtggcccagcgctcaggcaacccggtgctcatgggcttctctagtggagatggctatttcgaaaacagcccactgatgtcccagccagtgtgggagaggtatcgccctgatagattcctgaattccaactcaggcctccaagggctgcagttctacaggctacaccgggaagaaaggcccaactaccgtctcgagtgcctgcagtggctgaagagccagcctcggtggcccagctggggctggaaccaggtctcctgcccttgttcctggcagcagggacgacgggacttacgattccaacccgtcagcataggtcgctggggcctcggcagtaggcagctgtgcagcttcacctcttggcgaggaggcgtgtgctgcagctacgggccctggggagagtttcgtgaaggctggcacgtgcagcgtccttggcagttggcccaggaactggagccacagagctggtgctgccgctggaatgacaagccctacctctgtgccctgtaccagcagaggcggccccacgtgggctgtgctacatacaggcccccacagcccgcctggatgttcggggacccccacatcaccaccttggatggtgtcagttacaccttcaatgggctgggggacttcctgctggtcggggcccaagacgggaactcctccttcctgcttcagggccgcaccgcccagactggctcagcccaggccaccaacttcatcgcctttgcggctcagtaccgctccagcagcctgggccccgtcacggtccaatggctccttgagcctcacgacgcaatccgtgtcctgctggataaccagactgtgacatttcagcctgaccatgaagacggcggaggccaggagacgttcaacgccaccggagtcctcctgagccgcaacggctctgaggtctcggccagcttcgacggctgggccaccgtctcggtgatcgcgctctccaacatcctccacgcctccgccagcctcccgcccgagtaccagaaccgcacggaggggctcctgggggtctggaataacaatccagaggacgacttcaggatgcccaatggctccaccattcccccagggagccctgaggagatgcttttccactttggaatgacctggcagatcaacgggacaggcctccttggcaagaggaatgaccagctgccttccaacttcacccctgttttctactcacaactgcaaaaaaacagctcctgggctgaacatttgatctccaactgtgacggagatagctcatgcatctatgacaccctggccctgcgcaacgcaagcatcggacttcacacgagggaagtcagtaaaaactacgagcaggcgaacgccaccctcaatcagtacccgccctccatcaatggtggtcgtgtgattgaagcctacaaggggcagaccacgctgattcagtacaccagcaatgctgaggatgccaacttcacgctcagagacagctgcaccgacttggagctctttgagaatgggacgttgctgtggacacccaagtcgctggagccattcactctggagattctagcaagaagtgccaagattggcttggcatctgcactccagcccaggactgtggtctgccattgcaatgcagagagccagtgtttgtacaatcagaccagcagggtgggcaactcctccctggaggtggctggctgcaagtgtgacgggggcaccttcggccgctactgcgagggctccgaggatgcctgtgaggagccgtgcttcccgagtgtccactgcgttcctgggaagggctgcgaggcctgccctccaaacctgactggggatgggcggcactgtgcggctctggggagctctttcctgtgtcagaaccagtcctgccctgtgaattactgctacaatcaaggccactgctacatctcccagactctgggctgtcagcccatgtgcacctgccccccagccttcactgacagccgctgcttcctggctgggaacaacttcagtccaactgtcaacctagaacttcccttaagagtcatccagctcttgctcagtgaagaggaaaatgcctccatggcagaagtcaacgcctcggtggcatacagactggggaccctggacatgcgggcctttctccgcaacagccaagtggaacgaatcgattctgcagcaccggcctcgggaagccccatccaacactggatggtcatctcggagttccagtaccgccctcggggcccggtcattgacttcctgaacaaccagctgctggccgcggtggtggaggcgttcttataccacgttccacggaggagtgaggagcccaggaacgacgtggtcttccagcccatctccggggaagacgtgcgcgatgtgacagccctgaacgtgagcacgctgaaggcttacttcagatgcgatggctacaagggctacgacctggtctacagcccccagagcggcttcacctgcgtgtccccgtgcagtaggggctactgtgaccatggaggccagtgccagcacctgcccagtgggccccgctgcagctgtgtgtccttctccatctacacggcctggggcgagcactgtgagcacctgagcatgaaactcgacgcgttcttcggcatcttctttggggccctgggcggcctcttgctgctgggggtcgggacgttcgtggtcctgcgcttctggggttgctccggggccaggttctcctatttcctgaactcagctgaggccttgccttgaaggggcagctgtggcctaggctacctcaagactcacctcatccttaccgcacatttaaggcgccattgcttttgggagactggaaaagggaaggtgactgaaggctgtcaggattcttcaaggagaatgaatactgggaatcaagacaagactataccttatccataggcgcaggtgcacagggggaggccataaagatcaaacatgcatggatgggtcctcacgcagacacacccacagaaggacactagcctgtgcacgcgcgcgtgcacacacacacacacacacacgagttcataatgtggtgatggccctaagttaagcaaaatgcttctgcacacaaaactctctggtttacttcaaattaactctatttaaataaagtctctctgactttttgtgtctccaaaa

SEQ ID NO: 19 - DNA, 1669 bp, Homo sapiens
  misc_feature: paraoxonase 2 (isoform 1)
ggactcggcctaggcggaggacggggcggagcgcggccggcaccatcgagccgggaagatggcaccgcccacggagctgctggccaggccggagcgaggcagcgcgcccggctcccgcgccatggggcggctggtggctgtgggcttgctggggatcgcgctggcgctcctgggcgagaggcttctggcactcagaaatcgacttaaagcctccagagaagtagaatctgtagaccttccacactgccacctgattaaaggaattgaagctggctctgaagatattgacatacttcccaatggtctggctttttttagtgtgggtctaaaattcccaggactccacagctttgcaccagataagcctggaggaatactaatgatggatctaaaagaagaaaaaccaagggcacgggaattaagaatcagtcgtgggtttgatttggcctcattcaatccacatggcatcagcactttcatagacaacgatgacacagtttatctctttgttgtaaaccacccagaattcaagaatacagtggaaatttttaaatttgaagaagcagaaaattctctgttgcatctgaaaacagtcaaacatgagcttcttccaagtgtgaatgacatcacagctgttggaccggcacatttctatgccacaaatgaccactacttctctgatcctttcttaaagtatttagaaacatacttgaacttacactgggcaaatgttgtttactacagtccaaatgaagttaaagtggtagcagaaggatttgattcagcaaatgggatcaatatttcacctgatgataagtatatctatgttgctgacatattggctcatgaaattcatgttttggaaaaacacactaatatgaatttaactcagttgaaggtacttgagctggatacactggtggataatttatctattgatccttcctcgggggacatctgggtaggctgtcatcctaatggccagaagctcttcgtgtatgacccgaacaatcctccctcgtcagaggttctccgcatccagaacattctatctgagaagcctacagtgactacagtttatgccaacaatgggtctgttctccaaggaagttctgtagcctcagtgtatgatgggaagctgctcataggcactttataccacagagccttgtattgtgaactctaaattgtacttttggcatgaaagtgcgataacttaacaattaattttctatgaattgctaattctgagggaatttaaccagcaacattgacccagaaatgtatggcatgtgtagttaattttattccagtaaggaacggcccttttagttcttagagcacttttaacaaaaaaggaaaatgaacaggttctttaaaatgccaagcaagggacagaaaagaaagctgctttcgaataaagtgaatacattttgcacaaagtaagcctcacctttgccttccaactgccagaacatggattccactgaaatagagtgaattatatttccttaaaatgtgagtgacctcacttctggcactgtgactactatggctgtttagaactactgataacgtattttgatgttttgtacttacatctttgtttaccattaaaaagttggagttatattaaagactaactaaaatcccaaaaaaaaaaaaaaaa

SEQ ID NO: 20 - DNA, 1633 bp, Homo sapiens
  misc_feature: paraoxonase 2 (isoform 2)
ggactcggcctaggcggaggacggggcggagcgcggccggcaccatcgagccgggaagatggcaccgcccacggagctgctggccaggccggagcgaggcagcgcgcccggctcccgcgccatggggcggctggtggctgtgggcttgctggggatcgcgctggcgctcctgggcgagaggcttctggcactcagaaatcgacttaaagcctccagagaagtagaatctgtagaccttccacactgccacctgattaaaggaattgaagctggctctgaagatattgacatacttcccaatggtctggctttttttagtgtgggtctaaaattcccaggactccacagctttgcaccagataagcctggaggaatactaatgatggatctaaaagaagaaaaaccaagggcacgggaattaagaatcagtcgtgggtttgatttggcctcattcaatccacatggcatcagcactttcatagacaacgaattcaagaatacagtggaaatttttaaatttgaagaagcagaaaattctctgttgcatctgaaaacagtcaaacatgagcttcttccaagtgtgaatgacatcacagctgttggaccggcacatttctatgccacaaatgaccactacttctctgatcctttcttaaagtatttagaaacatacttgaacttacactgggcaaatgttgtttactacagtccaaatgaagttaaagtggtagcagaaggatttgattcagcaaatgggatcaatatttcacctgatgataagtatatctatgttgctgacatattggctcatgaaattcatgttttggaaaaacacactaatatgaatttaactcagttgaaggtacttgagctggatacactggtggataatttatctattgatccttcctcgggggacatctgggtaggctgtcatcctaatggccagaagctcttcgtgtatgacccgaacaatcctccctcgtcagaggttctccgcatccagaacattctatctgagaagcctacagtgactacagtttatgccaacaatgggtctgttctccaaggaagttctgtagcctcagtgtatgatgggaagctgctcataggcactttataccacagagccttgtattgtgaactctaaattgtacttttggcatgaaagtgcgataacttaacaattaattttctatgaattgctaattctgagggaatttaaccagcaacattgacccagaaatgtatggcatgtgtagttaattttattccagtaaggaacggcccttttagttcttagagcacttttaacaaaaaaggaaaatgaacaggttctttaaaatgccaagcaagggacagaaaagaaagctgctttcgaataaagtgaatacattttgcacaaagtaagcctcacctttgccttccaactgccagaacatggattccactgaaatagagtgaattatatttccttaaaatgtgagtgacctcacttctggcactgtgactactatggctgtttagaactactgataacgtattttgatgttttgtacttacatctttgtttaccattaaaaagttggagttatattaaagactaactaaaatcccaaaaaaaaaaaaaaaa

SEQ ID NO: 21 - DNA, 2725 bp, Homo sapiens
  misc_feature: protein tyrosine phosphatase type IVA, member 3 (isoform 1)
gcactgctgcgcccagggtcgccgcgcctcctgctgaggggtccccgtgccactggctctcaccattgccctcgcctgccgatggcctctgctgcccagcctggggccagctctaccgcctgagccccctgccccactccaggactcaccgtaccccgatggggtaacgtgacacaggccccacacgtcagaggccgctgtccccacggccactgcccgtgacccctggcccaaggcagctggagttggttcagttcaagttcattcttcctctggcccttgggggcttggggcccacctctgagtgaagggggctgtctgcccatccaccaatgtggagagggcgcccccggtgtggggtccagctctggacactgcttggcggccgggttcactttgagtttttaagttttctttgctgagcttttttggttgttctttttattttttgcctctttatgactatccagctctgagagacgggagtttggagttgcccgctttactttggttgggttggggggggcggcgggctgttttgttccttttcttttttaagagttgggttttcttttttaattatccaaacagtgggcagcttcctcccccacacccaagtatttgcacaatatttgtgcggggtatgggggtgggtttttaaatctcgtttctcttggacaagcacagggatctcgttctcctcattttttgggggtgtgtggggacttctcaggtcgtgtccccagccttctctgcagtcccttctgccctgccgggcccgtcgggaggcgccatggctcggatgaaccgcccggccccggtggaggtgagctacaaacacatgcgcttcctcatcacccacaaccccaccaacgccacgctcagcaccttcattgaggacctgaagaagtacggggctaccactgtggtgcgtgtgtgtgaagtgacctatgacaaaacgccgctggagaaggatggcatcaccgttgtggactggccgtttgacgatggggcgcccccgcccggcaaggtagtggaagactggctgagcctggtgaaggccaagttctgtgaggcccccggcagctgcgtggctgtgcactgcgtggcgggcctgggccgggctccagtccttgtggcgctggcccttattgagagcgggatgaagtacgaggacgccatccagttcatccgccagaagcgccgcggagccatcaacagcaagcagctcacctacctggagaaataccggcccaaacagaggctgcggttcaaagacccacacacgcacaagacccggtgctgcgttatgtagctcaggaccttggctgggcctggtcgtcatgtaggtcaggaccttggctggacctggaggccctgcccagccctgctctgcccagcccagcaggggctccaggccttggctggccccacatcgccttttcctccccgacacctccgtgcacttgtgtccgaggagcgaggagcccctcgggccctgggtggcctctgggccctttctcctgtctccgccactccctctggcggcgctggccgtggctctgtctctctgaggtgggtcgggcgccctctgcccgccccctcccacaccagccaggctggtctcctctagcctgtttgttgtggggtgggggtatattttgtaaccactgggcccccagcccctcttttgcgaccccttgtcctgacctgttctcggcaccttaaattattagaccccggggcagtcaggtgctccggacacccgaaggcaataaaacaggagccgtggccgtgtgtgtggagtgggctacagcgtcaggcggggcgggctggtggcctgggggccccagaggctgctgtctggatcctgggctggtgcccaggatggggctcccgcgtgctcttgcgctgccctctggtggccgctctgggtccttgcaccccgacccaggggccagcctgccctgtcctgtcctgataccgaggtgggagccctgccttggccagggtggccgtgttgacggttcttgggactgtgacattggaaggcgaggcaggtcaccagcactgtcctctgcaggatgggctgggattcatttggcagcttctcagggcctgtgtccggctggttggtccctgtgctgcccaaaccaggtgtccacatttccggctccgaggcgcagagaagggggcaggtggtggcttgggtggaggaagtcaccatccatcagcccagggagggagggtgccacctgggcacctggggctggatgtgagaggcctggaccagggcccgccggagggcgtggaccagatgctcatgtgttcctgggtgcagtgtctgtgttgggggctggccccaccctgggccggggtgcatggagggcatggccccagcggggaggaaggtgggcctagggctggctccagggtgtggagagcctgggagtggtctccgtcctggggccccaggaggttcccgcaaggagcgactggggcaggtgctggaggaggtcagtggacaagatggggagatgtggaaaccccaaaagccccttctcaggcagccctgcccccaagaccgacagatggctaagggggccgcagacctggctcccccagctcctgtgtggagaaagggcaacagctgtcccggatggttattctctcctttcctcaaacacatttggaactcaagtaaatccaatgcatgttgggtgaa

SEQ ID NO: 22 - DNA, 2710 bp, Homo sapiens
  misc_feature: protein tyrosine phosphatase type IVA, member 3 (isoform 2)
atgctgtgtgctgtggacccacctggggttcatggagtgggccacggggcccagccctaagcactgctgcgcccagggtcgccgcgcctcctgctgaggggtccccgtgccactggctctcaccattgccctcgcctgccgatggcctctgctgcccagcctggggccagctctaccgcctgagccccctgccccactccaggactcaccgtaccccgatggggtaacgtgacacaggccccacacgtcagaggccgctgtccccacggccactgcccgtgacccctggcccaaggcagctggagttggttcagttcaagttcattcttcctctggcccttgggggcttggggcccacctctgagtgaagggggctgtctgcccatccaccaatgtggagagggcgcccccggtgtggggtccagctctggacactgcttggcggccgggttcactttgagtttttaagttttctttgctgagcttttttggttgttctttttattttttgcctctttatgactatccagctctgagagacgggagtttggagttgcccgctttactttggttgggttggggggggcggcgggctgttttgttccttttcttttttaagagttgggttttcttttttaattatccaaacagtgggcagcttcctcccccacacccaagtatttgcacaatatttgtgcggggtatgggggtgggtttttaaatctcgtttctcttggacaagcacagggatctcgttctcctcattttttgggggtgtgtggggacttctcaggtcgtgtccccagccttctctgcagtcccttctgccctgccgggcccgtcgggaggcgccatggctcggatgaaccgcccggccccggtggaggtgagctacaaacacatgcgcttcctcatcacccacaaccccaccaacgccacgctcagcaccttcattgaggacctgaagaagtacggggctaccactgtggtgcgtgtgtgtgaagtgacctatgacaaaacgccgctggagaaggatggcatcaccgttgtggactggccgtttgacgatggggcgcccccgcccggcaaggtagtggaagactggctgagcctggtgaaggccaagttctgtgaggcccccggcagctgcgtggctgtgcactgcgtggcgggcctgggccggaagcgccgcggagccatcaacagcaagcagctcacctacctggagaaataccggcccaaacagaggctgcggttcaaagacccacacacgcacaagacccggtgctgcgttatgtagctcaggaccttggctgggcctggtcgtcatgtaggtcaggaccttggctggacctggaggccctgcccagccctgctctgcccagcccagcaggggctccaggccttggctggccccacatcgccttttcctccccgacacctccgtgcacttgtgtccgaggagcgaggagcccctcgggccctgggtggcctctgggccctttctcctgtctccgccactccctctggcggcgctggccgtggctctgtctctctgaggtgggtcgggcgccctctgcccgccccctcccacaccagccaggctggtctcctctagcctgtttgttgtggggtgggggtatattttgtaaccactgggcccccagcccctcttttgcgaccccttgtcctgacctgttctcggcaccttaaattattagaccccggggcagtcaggtgctccggacacccgaaggcaataaaacaggagccgtggccgtgtgtgtggagtgggctacagcgtcaggcggggcgggctggtggcctgggggccccagaggctgctgtctggatcctgggctggtgcccaggatggggctcccgcgtgctcttgcgctgccctctggtggccgctctgggtccttgcaccccgacccaggggccagcctgccctgtcctgtcctgataccgaggtgggagccctgccttggccagggtggccgtgttgacggttcttgggactgtgacattggaaggcgaggcaggtcaccagcactgtcctctgcaggatgggctgggattcatttggcagcttctcagggcctgtgtccggctggttggtccctgtgctgcccaaaccaggtgtccacatttccggctccgaggcgcagagaagggggcaggtggtggcttgggtggaggaagtcaccatccatcagcccagggagggagggtgccacctgggcacctggggctggatgtgagaggcctggaccagggcccgccggagggcgtggaccagatgctcatgtgttcctgggtgcagtgtctgtgttgggggctggccccaccctgggccggggtgcatggagggcatggccccagcggggaggaaggtgggcctagggctggctccagggtgtggagagcctgggagtggtctccgtcctggggccccaggaggttcccgcaaggagcgactggggcaggtgctggaggaggtcagtggacaagatggggagatgtggaaaccccaaaagccccttctcaggcagccctgcccccaagaccgacagatggctaagggggccgcagacctggctcccccagctcctgtgtggagaaagggcaacagctgtcccggatggttattctctcctttcctcaaacacatttggaactcaagtaaatccaatgcatgttgggtgaa

SEQ ID NO: 23 - DNA, 7001 bp, Homo sapiens
  misc_feature: semaphorin 6A
ggagacgccagccaaagtaggcggagttgcggaaggagagtccgatctgcgcaatccagtccgggacttggctccgcccgggagcggcggcctctccggtgacagaggagtagtgagcggcacggggtgaggctgcagccaactccgctccccgcgcactcggctgcccaggcgctcggaacccagcagcggcgctcctccgcggtgccggtcgcccgcgatgcccgcttagcagcgtgtagcagcggccagcatcaccacacccgcggcaccgcgctgccggccgcagagccgggccagagccttgcacccctgccccagcccccaccccgccccccgccctgaaatgacttgttaatcggcgcagacaccaccaaggggactcaccgaagtggaatccaagtggaatttggatttggagaagagtttcttgaacatttaccctcttccttgttggttttctttttctttttcttctttttttttttggcttcttttttcctctccccttctccgctcgtcattggagatgaacacatcgcgtttgcatcccagaaagtagtcgccgcgactatttcccccaaagagacaagcacacatgtaggaatgacaaaggcttgcgaaggagagagcgcagcccgcggcccggagagatcccctcgataatggattactaaatgggatacacgctgtaccagttcgctccgagccccggccgcctgtccgtcgatgcaccgaaaagggtgaagtagagaaataaagtctccccgctgaactactatgaggtcagaagccttgctgctatatttcacactgctacactttgctggggctggtttcccagaagattctgagccaatcagtatttcgcatggcaactatacaaaacagtatccggtgtttgtgggccacaagccaggacggaacaccacacagaggcacaggctggacatccagatgattatgatcatgaacggaaccctctacattgctgctagggaccatatttatactgttgatatagacacatcacacacggaagaaatttattgtagcaaaaaactgacatggaaatctagacaggccgatgtagacacatgcagaatgaagggaaaacataaggatgagtgccacaactttattaaagttcttctaaagaaaaacgatgatgcattgtttgtctgtggaactaatgccttcaacccttcctgcagaaactataagatggatacattggaaccattcggggatgaattcagcggaatggccagatgcccatatgatgccaaacatgccaacgttgcactgtttgcagatggaaaactatactcagccacagtgactgacttccttgccattgacgcagtcatttaccggagtcttggagaaagccctaccctgcggaccgtcaagcacgattcaaaatggttgaaagaaccatactttgttcaagccgtggattacggagattatatctacttcttcttcagggaaatagcagtggagtataacaccatgggaaaggtagttttcccaagagtggctcaggtttgtaagaatgatatgggaggatctcaaagagtcctggagaaacagtggacgtcgttcctgaaggcgcgcttgaactgctcagttcctggagactctcatttttatttcaacattctccaggcagttacagatgtgattcgtatcaacgggcgtgatgttgtcctggcaacgttttctacaccttataacagcatccctgggtctgcagtctgtgcctatgacatgcttgacattgccagtgtttttactgggagattcaaggaacagaagtctcctgattccacctggacaccagttcctgatgaacgagttcctaagcccaggccaggttgctgtgctggctcatcctccttagaaagatatgcaacctccaatgagttccctgatgataccctgaacttcatcaagacgcacccgctcatggatgaggcagtgccctccatcttcaacaggccatggttcctgagaacaatggtcagataccgccttaccaaaattgcagtggacacagctgctgggccatatcagaatcacactgtggtttttctgggatcagagaagggaatcatcttgaagtttttggccagaataggaaatagtggttttctaaatgacagccttttcctggaggagatgagtgtttacaactctgaaaaatgcagctatgatggagtcgaagacaaaaggatcatgggcatgcagctggacagagcaagcagctctctgtatgttgcgttctctacctgtgtgataaaggttccccttggccggtgtgaacgacatgggaagtgtaaaaaaacctgtattgcctccagagacccatattgtggatggataaaggaaggtggtgcctgcagccatttatcacccaacagcagactgacttttgagcaggacatagagcgtggcaatacagatggtctgggggactgtcacaattcctttgtggcactgaatgacatttcaactcctctaccagataatgaaatgtcttacaacacagtgtatgggcattccagttccctcttgcccagcacaaccacatcagattcgacggctcaagaggggtatgagtctaggggaggaatgctggactggaagcatctgcttgactcacctgacagcacagaccctttgggggcagtgtcttcccataatcaccaagacaagaagggagtgattcgggaaagttacctcaaaggccacgaccagctggttcccgtcaccctcttggccattgcagtcatcctggctttcgtcatgggggccgtcttctcgggcatcaccgtctactgcgtctgtgatcatcggcgcaaagacgtggctgtggtgcagcgcaaggagaaggagctcacccactcgcgccggggctccatgagcagcgtcaccaagctcagcggcctctttggggacactcaatccaaagacccaaagccggaggccatcctcacgccactcatgcacaacggcaagctcgccactcccggcaacacggccaagatgctcattaaagcagaccagcaccacctggacctgacggccctccccaccccagagtcaaccccaacgctgcagcagaagcggaagcccagccgcggcagccgcgagtgggagaggaaccagaacctcatcaatgcctgcacaaaggacatgccccccatgggctcccctgtgattcccacggacctgcccctgcgggcctcccccagccacatccccagcgtggtggtcctgcccatcacgcagcagggctaccagcatgagtacgtggaccagcccaaaatgagcgaggtggcccagatggcgctggaggaccaggccgccacactggagtataagaccatcaaggaacatctcagcagcaagagtcccaaccatggggtgaaccttgtggagaacctggacagcctgccccccaaagttccacagcgggaggcctccctgggtcccccgggagcctccctgtctcagaccggtctaagcaagcggctggaaatgcaccactcctcttcctacggggttgactataagaggagctaccccacgaactcgctcacgagaagccaccaggccaccactctcaaaagaaacaacactaactcctccaattcctctcacctctccagaaaccagagctttggcaggggagacaacccgccgcccgccccgcagagggtggactccatccaggtgcacagctcccagccatctggccaggccgtgactgtctcgaggcagcccagcctcaacgcctacaactcactgacaaggtcggggctgaagcgtacgccctcgctaaagccggacgtaccccccaaaccatcctttgctcccctttccacatccatgaagcccaatgatgcgtgtacataatcccagggggagggggtcaggtgtcgaaccagcaggcaaggcgaggtgcccgctcagctcagcaaggttctcaactgcctcgagtacccaccagaccaagaaggcctgcggcagagccgaggacgctgggtcctcctctctgggacacaggggtactcacgaaaactgggccgcgtggtttggtgaaggtttgcaacggcggggactcaccttcattctcttccttcactttcccccacaccctacaacaggtcggacccacaaaagacttcagttatcatcacaaacatgagccaaaagcacatacctaccccatcccccacccccacacacacacacacacacacatgcacacaacacatacacacacacgcacagaggtgaacagaaactgaaacattttgtccacaacttcacgggacgtggccagactgggtttgcgttccaacctgcaaaacacaaatacattttttaaaatcaagaaaatttaaaaagacaaaaaaaaaagaattcattgataattctaactcagactttaacaatggcagaagtttactatgcgcaaatactgtgaaatgcccgccagtgttacagctttctgttgcagcagataaatgccatgttgggcaactatgtcatagatttctgctcctcctctcttttaatgaaataacgtgaccgttaacgcaagtaactctttatttattgttcaccctttttttccttaaggaaaggactcttccaaatatcatcctatgaacagctcttcagaaagcccattgaaagttaaactatttaacgtgaaatccattaactggaataattgagtttctttatttttacaataaattcactgagtaaataagttggagctggaattctgagctttgtgtttggactgtctggtctgtagctaaaggaaaaagttaggaggggaatatttatttaaatctatcagttcattgcctggtcaggtctctggcctataaacatgcaaaaaaactaattcatgttaaagtccttccagatcctaatttctaaagcaatcaggagagaaagcttttagaatggcacatcatatctcattgatgccaacatggttttgtccatggttctgactttctgtgaaggcaccagcttgcaatatgccatcccatttcaccttgcatgtgagacagcaaacaaaatccacaaatggtgtgaactaatatgctggctgctaccttgcataaattaatgatttgatcacacgggttcttcgtggggttacatctgtgaatagcctgttttccacatgtaaatttgtgccttacaccttgagttgtgtacacttgtaaactctttatgatcaactgttcccccttttgaaataagtgcagatatttatttaaccctcccttccccaccctctgccccacttccagccctctgaaagattggagtcaagcagatggaagaatgcagtggtgatagttgtcatgcgacagcctgagaacgctgggcagcaccacaccctccaattcacactgccttctagttgtgccaactggaaccaccctttggctgtgctgcgaagcatggaccccagtgttgttgtgggtgtgtcaaatcccctttcatcctcaagagctccctgcttcccttagattatttcaatacggtgatatccttatttgctagcagaaaagggactaacgtcccattcctcttttctgctgcgtccactggctagagagcaggcggtgcgcggttgggcagacacctgggaggagtctccaagccatgtgcacagcacacacgtgcagtgcacacaaagaaatgacatggaaatagatgcaggcaggctggtccctgctgtgattaacgagtaactccaagtacaaggccgaccacaatggatgctgcaaaaacgttgactggggcaaaggattttttattttattttttattttgttaattatgtttttaggggatgggaggtggtgtgtgtttttctcctcttggttttcatttgctcaagcacacaaaagggacttttgtttactctatcatgaacaaaggaactgtccacatactgtaaaccatgagcagtgttgttgttgtttttttaaacagtatatttggtggtctctttgtctgcttttatttccagttcgatcttctgggtttagttttgtctttaaaaagaattcaaaaaaagactgacaatgacagttttgagttggatagtgaaaaagtggagcctccataatcagtgtggttgccttcagacctgagtacttagctgagggtgggtgagagccctttgttccaaaagtccattagttttgctgttgtttaggagtaggtggttgttgttgtttttactttttttttttttggcttttgtaatggaatccatgttcacatcctgtgaactctgtctcctgaaaccctgaagtatttcctagaacctgaaatattgttttcttccttgaattttctctagaaatgcagaaattaggaaggtgatgggtctgtatccccctgcccccttctttcccatgcttgactcccgagagtactggcagtgcagcacccatcattgacgtaagcggctgtcttgtccagtgtttgtaggcatcactgcctcagctgttaaggagacctgtgtcaaaacttacatccacattcctacacccccacaacccatcacttctggtgttaaccctaaaatacccacatgtattgagctggtcttctgcatttaagtatttctccccagtttttttccccactgtgtgtggggggagggtccataaacccgagtgtgcctttgctttccacccttgctagacactggtagatgcaacaaactcagatttatatttgttgtaaagttgtaaaaatattgtgatgtcaccaattttccttccatctccacatcccctaacatctgattcacgacttaatgtatgttgtaagaaaagaaaaaagaaaagaaaaaaagggaaaaaagaaaagcaaggaaaaggctctttattacttaaaagtaataaaacctgactgttctatattaaaaaaaaaaaaaaaaaaaa

SEQ ID NO: 24 - DNA, 3318 bp, Homo sapiens
  misc_feature: solute carrier family 37 member 3
agggtcacgtgggcgtccggaaaccctggtcgcaccgccaggggtgagctggcggcgggggaggcgggcagcggagccaagctgacccggcgagcggagccggggctggagagcggcgaccactgcggatctcggaaggaagaaatgatgtaaatcactcatccaaaccttaaggtcaaaggtgagaaggaaggtcaggaagaacatggcctggccaaatgtttttcaaagagggtctctgctgtcccagttcagccatcatcatgttgtagtgttcctgctcactttcttcagttattcgttgctccatgcttcacgaaaaacatttagcaatgtcaaagtcagtatctctgagcagtggaccccaagtgcttttaacacgtcagttgagctgcctgtggagatctggagcagcaaccatttgttccccagtgcagagaaagcgactcttttcctcggcacactggataccattttcctcttctcctatgctgtgggcctattcatcagtggcatcgttggggatcggttgaatttgcgatgggttctgtcttttggcatgtgctcttctgcattagtggtgtttgtctttggtgcgctcacagaatggctgcgtttctacaacaaatggctgtactgctgcctgtggattgtgaacggcctgctgcagtccactggttggccctgtgtggttgctgttatgggcaactggtttgggaaagccggacgaggagttgtttttggtctctggagtgcctgtgcttcggtgggcaacattttgggagcgtgcctagcttcttctgttcttcagtatggttatgagtatgcctttctggtgacggcgtctgtgcagtttgctggtgggatcgttatcttctttggactcctggtgtcaccagaagaaattggtctctcgggtattgaggcagaagaaaactttgaagaagactcacacaggccattaattaatggtggtgaaaatgaagacgaatatgagccgaattattcaatccaagatgatagttctgttgcccaagtcaaggcgataagcttctaccaggcatgttgccttcctggagtcataccgtactcactggcctacgcctgcttgaagttagtgaattactccttcttcttctggctccccttttatctgagtaacaacttcggctggaaggaggcggaagccgacaagctgtccatttggtacgacgttggagggatcataggtggaactttgcaaggcttcatctctgatgtactacagaagagagcgccggttcttgccctgagtctgcttctggcagttgggtccctcatcgggtatagtcgattttttattggtggaccttctaatatgattagttctgctatttctgcggacttgggtcgccaggagctcatccaaaggagcagtgaagctttggccactgtcacaggaattgtggatggttcggggagcattggagctgcagtgggccagtatttagtgtctctgatccgggacaagctaggatggatgtgggttttctactttttcattctcatgacaagttgtacaattgtgtttatctcgccattaatagtgagggaaatattctctctcgtgctaaggagacaggctcacatattgagggagtgaccggtgcccgcgagacagaaagaacaatgtcagccacatcaggaccgctggggcttcgagtctgccctaatttgggtttgtctaggagctccagcctgatcttggattgtcaggcgtctctcaacactgccagccacctgagatgctgaccagcagtgaaggctgcactagttttctacactacaggaattactgttgatgatttttgctgttgtttcatgaatgtgccgagtgacttctgactctgccagcatctttgacctctgactctgcccgcgtctttgtttggcctattgaggtttagcgttttaaccttaactgttgttttggacttgaactttctctagccttgaaaatggagtgaacaggaggcaaagccacgcgtggtttgtgttggtggtatgttccacaaatggaagagatcattgcattttgctttggtaatgagtttacagagagtgggtcatctttgaagcatcaaatcctgatcaaatgctcaagctggaccgagctgcaagcctgccttggacaaagaatccctctgttcactgtggtgggaaagatcacactacatgcctgttgattggctcagtcactctgtgtctgatctaaacgtcattcagccctagaagcatgaattgcttcaaattattgtcaacttgttctcttccattttcattcaaattaactttgactcctggaagtattgagtcttcctttcaaggaccataaggtacatcagttatcttgaacattctgacgtgtaaaggaccataaggtacatcatttatcttgaacattccgacgtgtaactcacagccgaagcactccatcccagatttgttgtctgggaacttaggatcctctaggaagctaatctgcttagtctatttttagaggattgatctctggcacaagcagcttcctggagttacctcagcagaagactagaattagagaaaagggaaagaccttttcttctagtaagtgtcaagtacagatgctctttgacttatgatggggttatgtcccagtaaacccattggaagtcaaatgcatttaatacccctgactggacaccacagcttagcctcgtccaccctaaatgtactcagaacacttagaattgcccacagttgggcagaatcatctaacacaaactctattttataatcgagtgttgaatatatcatgtaatttattgaatattgtacattatgttgaaattgcaaccatttcacaccattgtaaagtccaaaaatcagaagctgaggactgtctgtacatgacattgaatcacatgaatggattactagggcctgaggggtgtccgttctttagaaaaatgtagagtatatatatcttcagggctgtgaattccatactagttatcaatattttaagatcattctgtatatacatattttaaattatgcaagcaaactaggaggagaatgtgcaattttgagggatacctaatttgcattcggttaggggatatttttcaacctcttgctttatactctgatatggggtgtgtttatgaacttgttaatgttatttaatcatgcagatttccaatcagtgtattgctcatttactgacaaaaagggaaaatacgaaacacagaaagggaaaataaactgacttttataatgaaaaaaaaaaaaaaaaaa

SEQ ID NO: 25 - DNA, 6335 bp, Homo sapiens
  misc_feature: Spermato-genesis associated serine rich 2 like
agtgctgagggagcaaagttcattttctcgggtaggagaagatgattctcttgcaacacgtgcggattgtgacaaaatctttcattaacaaggggagtttcggtgaagtggaggtttggggaaaggcgaggaagtcggtctggagcaagcaagcaaagtgcggaagctgtactgggattcttctagaaagtggggtgggaaaggagctagggagggcgtgtggagggacgagatctgtgtcagaacgtgcgtgtgagcggatacaaaacccgagagaggcgtgagcagcgctgtgtttgcgagcgggagcgaggggcgccggctggggtgtgtgctcctgagctcttcagaaaccaggctgctttcaggaacattgctgtggattcccagggcctattccactagaagcaagatggctgaactcaatactcatgtgaatgtcaaggaaaagatctatgcagttagatcagttgttcccaacaaaagcaataatgaaatagtcctggtgctccaacagtttgattttaatgtggataaagccgtgcaagcctttgtggatggcagtgcaattcaagttctaaaagaatggaatatgacaggaaaaaagaagaacaataaaagaaaaagaagcaagtccaagcagcatcaaggcaacaaagatgctaaagacaaggtggagaggcctgaggcagggcccctgcagccgcagccaccacagattcaaaacggccccatgaatggctgcgagaaggacagctcgtccacagattctgctaacgaaaaaccagcccttatccctcgtgagaaaaagatctcgatacttgaggaaccttcaaaggcacttcgtggggtcacagaaggcaacagactactgcaacagaaactatccttagatgggaaccccaaacctatacatggaacaacagagaggtcagatggcctacagtggtcagctgagcagccttgtaacccaagcaagcctaaggcaaaaacatctcctgttaagtccaatacccctgcagctcatcttgaaataaagccagatgagttggcaaagaaaagaggcccaaatattgagaaatcagtgaaggatttgcaacgctgcaccgtttctctaactagatatcgcgtcatgattaaggaagaagtggatagttccgtgaagaagatcaaagctgcctttgctgaattacacaactgcatcattgacaaagaagtttcattaatggcagaaatggataaagttaaagaagaagccatggaaatcctgactgctcgtcagaagaaagcagaagaactaaagagactcactgaccttgccagtcagatggcagagatgcagctggccgaactcagggcagaaattaagcactttgtcagcgagcgtaaatatgacgaggagctcgggaaagctgcccggttttcctgtgacatcgaacagctgaaggcccaaatcatgctctgcggagaaattacacatccaaagaacaactattcctcaagaactccctgcagctccctgctgcctctgctgaatgcgcacgcagcaacctctgggaaacagagtaacttttcccgaaaatcatccactcacaataagccctctgaaggcaaagcggcaaaccccaaaatggtgagcagtctccccagcaccgccgacccctctcaccagaccatgccggccaacaagcagaatggatcttctaaccaaagacggagatttaatccacagtatcataacaacaggctaaatgggcctgccaagtcgcagggcagtgggaatgaagccgagccactgggaaagggcaacagccgccacgaacacagaagacagccgcacaacggcttccggcccaaaaacaaaggcggtgccaaaaatcaagaggcttccttggggatgaagacccccgaggccccggcccattctgaaaagccccggcgaaggcagcacgctgcagacacctcggaggccaggcccttccggggtagtgtcggtagggtttcacagtgcaatctctgccccacgagaatagaagtttccacagatgcagcagttctctcagtcccggctgtgacgttggtggcctgagctaggaggaaaaagagcagttttcactcagttttggttccctgcccgaggtgctgacccaattcgctgccaaaagagtgtcaatcagaatatacaaatcccgtatggttgtgtcatcctctcttaatcatttttactaattctaataatcagctctagcttgcttcataattttcatggctttgcttgatctgttgatgctttctctcatcaagactttgcagcattttagccaggcagtatttactcattattaggaaaatcaagatgtggctgaagatcagaggctcagttagcaacctgtgttgtagcagtgatgtcagtccattgattgtctttagagagttaatgttacaaaaaagaattcttaataatcagacaaacatgatctgctgaggacacatgcgcttttgtagaatttaacatctggtgtttttctgaaaaaatatatatacatatattgctttatttgaaacaaattaaaatatgctgcatttgacacctggctagtttcttttattgatacccacctagttattgaatgtactgtttagtgctttcaaaaaaaactttagagactagaggttgtggtgcaaagctgtgtacaataaatactgtttctgttgagacaagtactctttcaggaaaatatatatatgccctttcaattagattacacaaatagatggatatgcaccctgatcatcttagacacaccatgtggcagttgggcagttggaaacattggttgcaagtactacaaacctcagctgagcctagcttcaacaataagaatttattggttcagtgagtgaaaagtccagttggtccaatttgatcaggatttcagctcccatctcttttttttttttcttttttctttttctttttttgagacagtcttgctttgtcacccaggtggagtgcaatggcatgatctcggctcactgcaacctccgcctcctgggttcaagccattctcctgcccggccttccgagtagctgggattacaggcatgtgccaccacgccctgctaatttttatattattagtacagacaggatttcaccatgttgtccaggctggtctcaaacccctgacctcaggtgatccacctgctttggcctccgaaactgccggaattacaggcatgagccaccgtacccggccagctcccatctcttaattatcttagctctcctttcctccttgggttgacattgcattcagaattgtggcaaagggccaccatgctcttaagactcaagtctattttccacactgtccagaggagagaagttatcctagtagcttctacacagagcaagtgtctttctcagaaatcccagcaaaggtcttgcataccattgctggtaggcctgtctcttaaaccaatcatgaaaggggggagagaagtgaatgggatgaactaatttgcatagactaattagagcccacccctggagcctgggtgtggccatcttcccagagttcctgagctagatggagaaggggtacttctcagaaagggaaaatggatacccaatggcccaaacccaaaatagccccagttcccctaactttgactacagggcagtccagtttgggtgccgcttccgttgcactcacatgtcctacatatctgttgactactcacaagtgcaaatgcttattctcaactcaacattaacattttttctggcaacccaggttcactggttctcttccacagagcggccctgagcagctgagcctgcaagccacgcaagcatctgtttcttcttttgccaagtacaggaggatgtttgctctctctgtagagagctttctgaggtctctgggtgtacccagagatttaatagaaattcttaacgttaagtcacattccaggaaggaaggaagagttgttcgttcaaataagaaagataaatgttcggcactgtaggccctgtttaccccatctgaggccctgaattcatatattacaagacggaaggattttgcacagttttttatgtagcaagattttgctcaccactgaaaaatgtcagtgtaaatgtgaccgctttaaagatgagtcaagtaattcttggaacagggaaaaaaatgaatttgccaggtcaggagttcacctgcctttgtcagagttgaacccaaccactcttgacctcgactcactcccttagggttaagaaagcccaaacacattcctgagcacagagcaaacactcccatgtcactgaaaagaaacaaaagaatgctaaaaagtgctcagacctgatcacattttttccaatattttttcctttttttttttttttttgagacagggtcttgctctatcacctaggctggagtgcatgtttttgagacagggtcttgctctatcacctaggctggagtgcatgatcatggctcactatagccttgaactcctgggctcaagccatcctcagcctcccaagttgcgaggactacaggtgtgcaccacaacgtcccagctactttttaaatttttagtagaaacgaggtctcactatggtgcccagactggtctcgaactccggagctcaagtgatcttcctgctttggcctcccaaagtgttagaattacaggcatgagccacctcgcctggctggtttttgcctttcttatagaccctgggcatgtaagcatttattagtttgcatttttgaaacagtaatttcaatattttagtgccaatgtcaggccgcttaaacactgtattacatatcttcatctgtctggtggaactattggtgtgatcctagagaactgagtcctattctgccattcatttaaagtgttttaaactctaatctctctacttaatgcacagtagtcagattattctcttaaacatttgcctagtagaggttaaaatagtttaatccttatgaagatggaataacttcaaactcacattgtggcacttagatcttccaccaagacttcatccgtgaaatccacacctccctgttgggttcccaattacattccaaatttacatttcttttgagaatctctgcatactccagctctgtcctgttgatcctattctagaagtgcttaatgcagcaagacacagaaagttaaacgcaaattgctgcaaaattcaccctcagtggaggactagaaacacaacatgtccaatttaaagctcagttcacaagcagttcaattctgctggcatcagaaaaggagattctaattaaacattcttagggaaggacatcaaatgaggttaatgggaaacgttaccagattaaaagcagttttttgacaaagtaacagatttggaaattctgactctctgaaagccttgatttgaacctcaaacttgatttcaccatgagaagtggggatcaagggcctgcgcagttcttttcctaaatcgattcggtgctccccaccccgacgcaggcacaggtccgcaaccagatagggagatgcctgaatttcaggctacctttgacaaagctttcttcctccctccctccctttgcacgctgcatcccacgctgcctgcttaaagcgccctcatgtgtctacagatggtaaaacgtttatttctcaacagacattccagtgatagcatccaatgacctatgtaacggcacccttttttgctgtacgcgttttttgagatggagtctcgctctgtcgcccaggctggagtgcagtggcgcggtctcggctcactgcaagctccgcctcccgggttcacgccattctcctgcctcagcctcccgagtagctgggactacaggcacccgccaccacacctggctaattttttgtatttttagtagatacagggtttcaccgtgttagccaggatggttttgatctcctgacctcgtgatccacccccctcggcctcccaaagtgctgggattacaggggtgagccactgcgcccggccccagtcacttgttcttaagtttcttaagcaaactataaaatagcaaaagaccaaaaaaaaaggaaaaaaagcagttcgcctaatacattgttccagcatttccttgaaagtactgagccatctcaattgctctgattttgtgagaaaattatgaagagttgcaaagtcccagtgattctcttgttacttagctaagaatttgaaatgtaatttaaatactattctttacaatccattataaggattttaaaatctttttgcttctttaataaattctaacaaagaaaaaaaaaaaaaa

SEQ ID NO: 26 - DNA, 3233 bp, Homo sapiens
  misc_feature: Trans-membrane protein 154
ggctggagaggcgtgataatagaaccagtgcttcaacagcaacttctcttttgcaatccttgctggtctgacaggctcctgcagaattacatcacttcctaaaaaacaggcacacacctctccttcaagtcagcaccgacccaaacaagcaggaaacaggaaatgttcacgtttcagagaggctgcagcccggcgcagcatcctgagcgcgcctctgccgaggcgagcggacatgcaggctccccgcgcagccctagtcttcgccctggtgatcgcgctcgttcccgtcggccggggtaattatgaggaattagaaaactcaggagatacaactgtggaatctgaaagaccaaataaagtgactattccaagcacatttgctgcagtgaccatcaaagaaacattaaatgcaaatataaattctaccaactttgctccggatgaaaatcagttagagtttatactgatggtgttaatcccattgattttattggtcctcttacttttatccgtggtattccttgcaacatactataaaagaaaaagaactaaacaagaaccttctagccaaggatctcagagtgctttacagacatatgaactgggaagtgaaaacgtgaaagtccctatttttgaggaagatacaccctctgttatggaaattgaaatggaagagcttgataaatggatgaacagcatgaatagaaatgccgactttgaatgtttacctaccttgaaggaagagaaggaatcaaatcacaacccaagtgacagtgaatcctaaacctgaatggcgctcatgttttccaagagaagcagcccctgagggagtctgctgaggctgccaacagaggatgaagaggatacaaatttaattaatttcaaatcaacatagacacaagaaccttttgctgtttcttccaacgcccactcttcctaatgatggcatcacttgcacttggaagaatgtgcaattgagaagtactaggaaaaggcctggctgccatccatcgctgcctctgagggtggagaaggaggcgggtgatgtgctcacttctgatcaacatgtgttgcctcctctcagccaacttctagctcactgcactcactctggtcatgataaatgttcgtcacctttctgcttcattccttagggcctaaatcaggaagctgttttatcgatggtttccttttgggtcagtaaccagctttggataatttcctctgattattcaagtcgtgggacaggtaaactacattcagcaggaacttttctcgaggagtgttatgtcatggaaaagacaccaaacacagcaagtattttaatgaatacaccatcccagggggtcagtaagctctgcctgccaagaagacacagtgagaggggtccacagtcctgatgaggtggcgtttggtaacttgtagaccctagcatggccaggtctggtcacccttaagaacttctcagagaaactaggaatcttcagtgaaagaactaatgttctcctcagctgaaattcccttgcttgtcagcatttctgcaaagctcacacttgtttcaccatacctcccttggatgtgacatgtaggtaggaagtatgtgcaggtgggagtcatctgtcagccttctatgtttcagagatcctgaaggtggtttgaaacaaacagaagaggagcaggaaatatccgtgcctgtggcagatctcactcatcatgcttagcattctctcccgccaagctgggataagcctcatgtcctaacacagcacaacaggaggtctctgtcagtccatcagagatgacattctatgtgatatttttgacatccttgtgctaaaagcaatggcacaaaatggaaaagggcctattgaccacacctactccagtaaaattgttcttcatttattccttaattttctaaatctgacccctttaaagcaatctagcaaattgagaatcctcagctctccttggatacctgatattttatttcaagaaagagacaaagaaggaaaattttatttattttactacccacatataaaccgaagggagatgggactacccaaacatttgctgctcaattttgtgtcttgtgcttgaaagtctgccctaatgcataacaaaaactacttgtctcctaccttttgggatccctttaacaagtatttgccttctgaactacgtggataatttcaaaggcagagttccagaccagagaggtctttccatacaatgaaagctataactagctggttgtgtttaaccactgctatcacgctatcctgggactgcatagaactttgacaaaagacagacttcatggtacacaacttcaacagattttctgtcatattctcaccagcacatctgaatgaggctttgtgttttccttgctctcttgcatgttccttttcaactcatggcccacagtgactctcagagatttatgccaaaattgcatacaattgttttctgaatcataacttgtctatttttctgcctatgtgtgctactttcagtttgtttctcatcaacattttgactctcagaagagcctccatttgcccctttctctctttaggtatctaagatctttgaacacctggacctttacatttgatccaaccctatcaaataatgaacttctcagagaggcatctggggtcctggaacttcatgttgatgaagtcatattatataatatgataaaaatattctcatgcagtattttaaataatttcaaattctagaagaagcaaatttcagcgacatgtcattgagtttttatttggtaaagctataattgtgcagtgtacaaagcactttttaaaaagatagtttattctgtcagggtatatgaagttagtatacagccagaacagccaagcctcaattcttgtaccttgtgtctttttattactgtttaatcaatagatatcatatgtttatgacagtttcaagaattgtttttaaacccaaacttaattttatgtttcagactattgttagaaaaacaaaacaaaaaacaaaaaaaccctcactaatttgccctaattggatagggcaatcagaacaaaatctgactttcgaatatttaaaagatatgtaagtttgattgcattttcgtacattttaagcaaactaggttaacaacaacatagcctagtcaaacttctcaggaaacttgttttaataaatatgtaaaaatacccaaaaaaaaaaaaaaaaaa

SEQ ID NO: 27 - DNA, 5666 bp, Homo sapiens
  misc_feature: tumor protein p53 inducible nuclear protein 1 (isoform a)
cgatcagctgttgcgagcgctgcacaacaacaaaaggacttggactggccggcctgggcgcagcgacccgagggctggagccggccccgcgcctgccgtctgggtacctgaacgaggtgcagcgcagcccggccccaccgcagctacctcagcagtcccgccccgcccgcgtccttccccgccgagccggcggccgctcccttccccgcgcagccccgcacggcccgggcccacgtacaatgactcttcttgcttttcacctaagttgaataagcaccctgtgcactttaatctcctgtcggtaccattgggccaactaaagacaaggttttgaaatctcagctataaaagacatccagccaaactctcagtcttgccttaacaatgttccagaggctgaataaaatgtttgtgggtgaagtcagttcttcctccaaccaagaaccagaattcaatgagaaagaagatgatgaatggattcttgttgacttcatagatacttgcactggtttctcagcagaagaagaagaagaagaggaggacatcagtgaagagtcacctactgagcacccttcagtcttttcctgtttaccggcatctcttgagtgcttggctgatacaagtgattcctgctttctccagtttgagtcatgtccaatggaggagagctggtttatcaccccacccccatgttttactgcaggtggattaaccactatcaaggtggaaacaagtcctatggaaaaccttctcattgaacatcccagcatgtctgtctatgctgtgcataactcctgccctggtctcagtgaggccacccgtgggactgatgaattacatagcccaagtagtcccagggccaggaaaagctgcttataagactcacgggcacagaagtggaagctcaaaatgaaatggggcagcatattcattgttatgttgcagctcttgctgctcatacaacttttctggaacaacccaagagctttcgcccttcccagtggataaaagaacacagtgaaagacagcctcttaacagaaatagccttcgtcgccaaaatcttaccagggattgccaccctcggcaagtcaagcacaatggctgggttgttcatcagccctgcccgcgtcagtacaattactaatagtttcaagttttgttggttggtttctcttggtttgtgcttacatgtatggatgtgtgtatatgtacagtgaaaatgttgtctctttacaaccaattgataaccaatcacatagttttatcagtgtatttagacactatcttgaaaatcagatttatatgctgtgtatcacataatgccttgcctttaacatttactttttttgtacactttttcagattatttctggaaacatatcaatataattacagtgtttgggggtgtctttaaatatattaggttatacattagtcagcattttaaagacatttcttcccaagtacgagaataggcatctttcattttcattttattttgtattacttaatcttttaagcaagcaaaaatttattctcagggtcagctgtacactttattgaccagtacttgataatctctctgtatatgatgaatacatttttacacactaacattagcattaacaggtgatagttgccatggatataatggaattatggctggactttcttttgaaagaaaacttgatgtattctgtgtgtatggtttttccccagattagtcatacagttcatttggaattcaggtacattaagctttagtgaagagtgcatgcagtaattccaatgtgactgcatgacgtggtacagacattacaggtgttgtagacagaggcacttgtctcgtgcagagggattaaattagacctgtgagattatatttggaaaaattcatgtctgtaactaacccattagtgcagtatttaatttgttactattccttcccgccaattctgtccactcctcacctcgcatcagctataaatttggaagtacttgtccaggcactcaagtgacttcatatttctctctgcccatgggaaaagagataggctttatatttccacagagtgaaaaatcctctgtcatggagcctgtcctgccaagtggcaagagtgtggggactgtctggtgatgatgtctttcatggcatctgagtgaagagtgacaggttggctcaacttttttctttttttttttttaattgccttgtattgtaagtattcttccctgcagtccaagtgacttttcattttttgttttaacttcaggcaaaatctttaaccactctggcctctgtttcccccaccaacggggagcagtgacatttacctccctcacagagtcactgtgaggattctatactgatttgaagtggagctgttcagaactgaaccttgtaggaaattccaagggcctttctactgaatctggtgatggggtggggccgtggcactttctctgccacagctgttcttcacagtgttggtgctaatgaggccagggtgcagggttcgattcacacgtaggccagttaacttagagaaaatctatttccttacctctagccagtcacttcctttttccgcagttgtgatgggttttgctgagccatccactctgactgatttcctctgaagtaaacatatttacaatccaaagcaattctactgacagaagtgttgccttcataatcaaacagcttgtttttccatctcctctgcaaccctaattaaatgagtacaggtctacaaaatgttttcaaggagaaaagcagcatatccttaagtgaagtattatatttttcaataaccctgtagtggcttgatgcagggaaccctgggggactttcagcgaagagctgtgctcttttctgactagattagagcgtttggagtggaagacgtcaaatgtgtagtgagatggaggttttacattgttcttctactggctgtgatgaagtgccagaatgtctctttagaacaagagttagattccccctttctccttattgccccttccgttttgacttcccctttatttatttgttgtctaattaggggccaagtctgtaaagttttgtcaaagtgagttagaagttgttttctcttactatttgtgtttaccagagttgggagataagatagtttccatgaaggtgtgtatgttttatacgatgtttgttatagggccatgcattggtaacttgaaaatagaccagcttaatgtcttcaggatgtaaaactctgaatacacggcgtctctttttcatacattgcatgtaagttgttagtacctcacaagctacagaagttcagccatgagattttgtttggcaacatgaacagatttgtgtataactgcaatggcctttttttccagatttccttattgactttttgtttgccttacctggggctagttttttatgctttgtacctagaaaacaaaaaattacattcgttgggctttttttcaaggttgggattaccacaccacctggaatatcatactgtggtttctgcctaaaattggcacatgtaagtattgaagaaaatggttatataattcagttgaaactcttggttattagatgttaggcatctcctgtatgtaagacacaaggccaaccacaacacagaacgatgttgacctgttaagtattctctgaaacatggccaaaatgcattttatgagcttttttttttgctattgtaaatattagtggtttacaatgcgctttagacatatttctttaaaatgcaagcagtgagaaataagacctctctgaattagtagctctaaactgttaacatagaatgttacttggaaaaagtctggaatatgtggtgtacacaagcagtgcttcgtgaatgagtttcttagcttttatagtgcgccatgtttctcaaagtttgtttttgttgacaaaacattttataatatatatcttatgtttattttttttctcaactaattgtgtactgcactgtaaggtgaaaattagccatccattatttatcttctgtggcaatgcatttatatggttgattgggtggggaattttttgcagaaagatgcaaagtgattgggttttcgacttcctatcgcagggagcttttaagaaatattaatttcctatacatttttccaatccccatgcaaactgttcctgtttacataccttctctgttgtatcagtactttgagtgagaagacagtttatttaaaacttgagcaggctgttcagcattgtttctgcttctgaaatctgtatagtacactggtttgtaatcattatgtcttcattgaaatccttgctacttctcttcctcctcaatgaaatacattatatattatctttatgtactcttaagaaaaacgagcaaggaagagtatcttcattattctcattttctctgagttggaaacaaaaacatgaaggactccaactagaagacagatatttacatttaaatagattagtgggaaaactttaagagtttccacatattagttttcattttttgagtcaagagactgctccttgtactgggagacactagtagtatatgtttgtaatgttactttaaaattatctttttattttataaggcccataaatactggttaaactctgttaaaagtgggccttctatcttggatggtttcactgccatcagccatgctgatatattagaaatggcatccctatctacttactttaatgcttaaaattatacataaaatgctttatttagaaaacctacatgatacagtggtgtcagccttgccatgtatcagtttcacttgaaatttgagaccaattaaatttcaactgtttagggtggagaaagaggtactggaaaacatgcagatgaggatatcttttatgtgcaacagtatcctttgcatgggaggagagttactcttgaaaggcaggcagcttaagtggacaatgttttgtatatagttgagaattttacgacacttttaaaaattgtgtaattgttaaatgtccagttttgctctgttttgcctgaagttttagtatttgttttctaggtggacctctgaaaaccaaaccagtacctggggaggttagatgtgtgtttcaggcttggagtgtatgagtggttttgcttgtattttcctccagagattttgaactttaataattgcgtgtgttttttttttttttaagtggctttgtttttttttctcaagtaaaattgtgaacatatttcctttataggggcagggcatgagttagggagactgaagagtattgtagactgtacatgtgccttcttaatgtgtttctcgacacattttttttcagtaacttgaaaattcaaaagggacatttggttaggttactgtacatcaatctatgcataaatggcagcttgttttcttgagccacggtctaaattttgtttttatagaaattttttatactgattggttcatagatggtcagttttgtacacagactgaacaatacagcactttgccaaaaatgagtgtagcattgtttaaacattgtgtgttaacacctgttctttgtaattgggttgtggtgcattttgcactacctggagttacagttttcaatctgtcagtaaataaagtgtcctttaacttcaaaaaaaaaaaaaaa

SEQ ID NO: 28 - DNA, 5666 bp, Homo sapiens; identical to SEQ ID NO: 27
  misc_feature: tumor protein p53 inducible nuclear protein 1 (isoform b)

SEQ ID NO: 29 - DNA, 1240 bp, Homo sapiens
  misc_feature: Wnt family member 9A
gcgctccgggcgctataagagggcggcggccgcggcgcgccctgcgcggagctgggagcgcgatggtcggccgccgaggcgcggcaagatgctggatgggtccccgctggcgcgctggctggccgcggccttcgggctgacgctgctgctcgccgcgctgcgcccttcggccgcctacttcgggctgacgggcagcgagcccctgaccatcctcccgctgaccctggagccagaggcggctgcccaggcgcactacaaggcctgcgaccggctgaagctggagcggaagcagcggcgcatgtgccgccgggacccgggcgtggcagagacgctggtggaggccgtgagcatgagtgcgctcgagtgccagttccagttccgctttgagcgctggaactgcacgctggagggccgctaccgggccagcctgctcaagcgaggcttcaaggagactgccttcctctatgccatctcctcggctggcctgacgcacgcactggccaaggcgtgcagcgcgggccgcatggagcgctgtacctgcgatgaggcacccgacctggagaaccgtgaggcctggcagtgggggggctgcggagacaaccttaagtacagcagcaagttcgtcaaggaattcctgggcagacggtcaagcaaggatctgcgagcccgtgtggacttccacaacaacctcgtgggtgtgaaggtgatcaaggctggggtggagaccacctgcaagtgccacggcgtgtcaggctcatgcacggtgcggacctgctggcggcagttggcgcctttccatgaggtgggcaagcatctgaagcacaagtatgagacggcactcaaggtgggcagcaccaccaatgaagctgccggcgaggcaggtgccatctccccaccacggggccgtgcctcgggggcaggtggcagcgacccgctgccccgcactccagagctggtgcacctggatgactcgcctagcttctgcctggctggccgcttctccccgggcaccgctggccgtaggtgccaccgtgagaagaactgcgagagcatctgctgtggccgcggccataacacacagagccgggtggtgacaaggccctgccagtgccaggtgcgttggtgctgctatgtggagtgcaggcagtgcacgcagcgtgaggaggtctacacctgcaagggctgagttcccaggccctgccagccctgctgcacagggtgcaggcattgcacacggtgt

SEQ ID NO: 30 - DNA, 5589 bp, Homo sapiens
  misc_feature: ArfGAP with SH3 domain, ankyrin repeat and PH domain 2
cgcccctctccgcgggaggcgtcggggcccgcggctgggtggcgggtagttcccgccggctgtgcgcgcccgcctcggggctcgctctgagaggacgcggcggcagcggactcggagccctcggcgcgcaggcgggcggaccggccgagctgcgcggggctgcgcgccgcccctgctccgccgccaggccccgcgcggctcccgcgcccggcgctcccctttgtccgcgggccggagcggcggcggcagcggcggtgtccgagcggcggtcggagcctgctgcggcagttgaggcggcggcgcccctgcggctgtgcgccagcgccctcgcgccgaggcgatgccggaccagatctccgtgtcggaattcgtggccgagacccatgaggactacaaggcgcccacggcctccagcttcaccacccgcacggcgcagtgccggaacactgtggcggccatcgaggaggctttggacgtggaccggatggttctttacaaaatgaagaaatccgtgaaagcaatcaacagctctgggctggctcacgtggaaaatgaagagcagtacacccaggctctggagaagtttggcggcaactgtgtatgcagagatgacccagatttaggaagtgcgttcctgaagttctcagtgtttacaaaggagttgacagcacttttcaaaaacctgattcagaatatgaacaacataatctccttccctttggacagtttgctgaagggggacctgaaaggagtgaaaggggatctgaaaaagccttttgataaagcttggaaggactatgaaacaaaaataaccaagatagaaaaggagaaaaaggaacacgccaagctccatgggatgattcggactgaaataagcggagcggaaattgccgaagagatggaaaaggagaggcgcttcttccagctacagatgtgcgagtatctgctgaaggtcaacgaaatcaagattaaaaagggagtagatttacttcagaatctgatcaaatactttcatgcccaatgcaatttttttcaggatggactcaaagccgtggaaagcctcaaaccttccattgaaacgctgtctacggatcttcacacgatcaaacaggcccaggatgaagaaagaaggcagttgatacagcttcgagatattttgaaatccgcattgcaggttgaacagaaagaggactcccaaattcgtcagagcacagcttatagcttacatcagcctcagggaaacaaggaacatgggaccgagcggaacggcagcctctacaagaagagtgacgggatccgaaaagtgtggcagaaaaggaaatgttcagttaaaaatggttttctgaccatatcccatggtaccgctaaccggcctcctgcaaagctcaacctgctaacctgccaggtgaagaccaaccctgaggagaagaagtgctttgacctcatttcacatgacagaacttaccactttcaagctgaagatgaacaggaatgtcaaatatggatgtctgtgctgcaaaatagcaaagaagaagctttaaacaatgcatttaagggggatgacaatactggagaaaataacatcgtccaagaactgacaaaggagatcatctcagaagtgcagaggatgacgggcaatgacgtctgctgtgactgtggggcgccagatcctacatggctttccaccaacctgggcatcctgacctgcatcgagtgttccggaatccaccgagagctgggggttcattattccaggatgcagtccctgaccttagatgtactgggaacatctgagctgctgctcgccaagaatattgggaatgcaggctttaatgagatcatggaatgttgcctaccagctgaggactcagtcaaacccaacccaggcagcgacatgaatgcaagaaaggactacatcacagccaagtacatcgagaggagatacgcaaggaagaagcacgcggataacgcggcgaagcttcacagtctttgcgaggccgtcaaaacgagagatatttttggattgctccaagcttatgctgatggtgtggatcttacggaaaaaatcccactggccaacggacatgagccggatgaaacggccctccaccttgcagtcagatccgtggatcgaacctctcttcacattgtagactttttagttcagaacagtgggaacctggataaacagacagggaaaggcagcacagccctgcactactgctgcctgaccgacaatgccgagtgcctcaagttgctcctgcgggggaaggcctccatcgagatagcaaacgagtcaggagagactccgctggacattgccaagcgcctcaagcacgagcactgtgaggagctgctgacccaagccttatctggaagatttaattctcacgttcacgttgaatatgaatggcgactactccacgaagacctggatgaaagtgatgacgacatggatgagaaattgcagcccagtcccaaccggcgggaagaccggcccatcagcttctaccagctgggctccaaccagcttcagtctaacgctgtatctttggccagagatgctgcaaaccttgccaaggagaagcagagggctttcatgcccagcatcttgcagaatgagacttacggagccctcctgagtggcagcccacctcccgcccagcctgcagcccccagcaccaccagcgcccccccgcttcctccacggaatgttggcaaagatcccctgacccccacgccgcccccacccgttgccaagacgcccagcgtaatggaagccttgagccagccgagcaagcctgccccgcctgggatctcacagatcaggcccccacctctgcccccacagccgcccagccgcctcccgcagaagaagcctgcgccgggggctgacaagtccaccccactgaccaacaaaggccaaccgagaggacctgtggatctctctgcaacggaagctctgggtcctctgtccaatgctatggtcctgcagccccctgcacccatgcctaggaagtcgcaggcaaccaagttgaagcctaagcgggtgaaagcgctctataactgtgtggctgacaaccccgatgagctcaccttctccgagggggatgtgatcatcgtggacggggaggaggaccaggagtggtggattggccacattgatggagatcctggtcgcaaaggcgcattcccggtgtcatttgtgcactttatcgctgactgaattgctactgaacaaaagcattaacagttatgttcctgtttcgttattggtaccaaaactcttgccagataaccagtttcatgaactgtttgtatggcagcccatgttctctaatgccactgctctgttttaaaaactcagaggcaatttttacatatcagtaattgtttttataatttgtggttttcatgaaacattgctatgcatttattaggaaaaactgaatttcccaacaggtgaactgaaaagttattttaactattatacataatcaagatcctgcctctacggaattagctaaacctaaaaatgtttgcattaatgaataaattcttcctgcattccttggcccagttctggagttggtgacctttatcacaattattattttaggcggccagtgaactgctgcttcagaagtccatagcccagctctgaactttctcgataaaatgccatcagttcacctttaaagacacacattcctttgaaatccacccagtgtttaaaaagcaacttggaaatttacacattagcattgtactttctagccctaatttgtgaggttgcagctatcattatattctgcatgtatgtataacctgttgtgaacaatcatacttaacaaaactactgatggtttatgacaacgtagggtaactacagttcattctgttccaggttatataaaactgcatttcctgaatttggttaaaaactaaggatgatggattgcaaaacagttcttttaaattagtttatatgctttaggtgttttggaatttgccttcttgaacttcctgagtcacacagaaagcaactgtacacagtagaattctgtggcgcagaccatgctgtattaacacatcacttgctgtttcctactgagtgtaccactgccttcccttctagcccaggagaatgtttactcagtttagtgtcttgtatttctataatactccaacaggaatggtagtcacactgtcttgaaattgaatctgtccatctgtttataatcaagaacatatcagaaatatataggtcccaggtaatactcccaaacatcccactttttactgtttcaggccatcatatcattcttaagctacttggggtggtagtagaggattaggttgtctattataaaaccaaaactcattcgtttaatgaacttgactgtcatacctctatttagtaattgcgagggtaagattcatagtaggaatattggaaattttggcactctgagaataaataggcatatgatacccacttggacttttaacaaaagtaaaggaataaatttgcatataggcttggaaagtgaggcagcaatgctgttaactgcatttgttgtgatggtgcatttgattgaagcagcttgtctttattatgcaagactgtgtagagttttttttttttttggcattgtactttttgtttttgttataaaggaagacagaacaaactggaatgttttatgatgttgtatagcaatcgctttttacctttcaaagttccgggtaaaaatgtgttatatctgtagttttttgtttttgtttttttttaaagcactacatctgttttcactaattgttaatttctgtttgaacccttcatttaattttctcatagatttaagtaaacagatgtattttgcacagtgcacttatgtctattttaacaatcctcctgcatctgtattttatagtcagccttttgaccacctggtgccagctatataaggaataaagttgattcatatcaacattagaactccagtcccaaactaatctgtcaggttcactggtacataaatacctaggaaatatttttccagtctacaatttggtgctattgtgcagtaactaatagtactcttaccagaggagaaattatattaacgaccctgctaatatcctttcttagttatttgctccttgcaaattaaaaaagcaactaagagaaagaaaaacattgtagatatctatttatatttaaagtttatgtttcatgaactgcagctgcaggattctggcattttgcatgccattctccatcagatctgggatgatggctcagaacatgtacacagactaagagtaactgtgtgatctgttaaggggtggataacataatatgcagcttaggatgctattttgagatgtatgatattcagttcattcacctgattactttggttgcagcacaactgtatatattgtataaccgaaattgattattttcattgtccttaatgcagtgatttataattagagcatgtttaataagtttactcttcttgttaactagtcatttgactggaaaaaaataaaatacttttaaatggacatggaaaaaaa

SEQ ID NO: 31 - DNA, 5575 bp, Homo sapiens
  misc_feature: formin like 2
gcggccgcgggcccggcagaaggccgagtaggagggaccacgcgccgggggccgcgatctctggcagggggcggtgtgccagcggagcaccatgcacataggcgcccagcgccccaactacccctcccgaggaaaagaggccggggccgcgctggggcggcggagagcatgagggaggccggggggcggctcggcttggagcgctgctagggagcggtgcgcgccgcacacccgcctgggcgcggcggagggcggggagccgggcaggtcgcgcctgcgggcggcagccgaccgccgggagctgttctgatttccgacgcgcacgctaggggcccggagcagcccccggccccggcgcgccgccgacatgggcaacgcagggagcatggattcgcagcagaccgatttcagggcgcacaacgtgcctttgaagctgccgatgccagagccaggtgaactggaggagcgatttgccatcgtgctgaatgctatgaacctacctcctgacaaagccaggttactgcggcagtatgataatgagaaaaaatgggaactgatttgtgatcaggaacgattccaggtgaagaatcctccccatacatacattcaaaagctcaaaggctatctggatccagctgtaaccaggaagaaattcagacggcgtgttcaagaatctacacaagtgctaagagaactggaaatttctttgagaactaaccacattggatgggtcagagaatttctgaatgaagaaaacaaaggtcttgatgttctagtggaatatctctcatttgcacagtacgcggtaacttttgactttgaaagtgtggagagtactgtggagagctcggtggacaaatcaaagccctggagtaggtccatcgaggacctgcacagagggagcaacctgccctcacctgtgggcaacagtgtctcccgctctggaagacattctgcactgcgatataatacattgccaagcagaagaactctgaaaaattcaagattagtgagtaagaaagatgatgtgcatgtctgtatcatgtgtttacgtgccatcatgaattatcagtatggtttcaacatggtcatgtctcatccacacgctgtcaatgagattgcactaagcctgaacaacaagaatcccagaacaaaagcccttgtcttagaactgttggcagccgtttgtcttgtcagaggcgggcatgaaatcattttatcagcatttgataactttaaagaggtttgtggagaaaaacagcgctttgagaagttgatggaacatttcaggaatgaagacaataacatagattttatggtggcttctatgcagtttattaatattgtagtccattcagtagaagatatgaatttcagagttcacctgcagtatgaatttaccaaattaggcctggacgaatacttggacaagctgaaacacactgagagtgacaagcttcaagtccagatccaggcttacctggacaatgtttttgatgtaggagctctactggaagatgctgaaactaagaatgctgccttggagagggtggaagaactggaagaaaacatttctcatttatctgaaaaactgcaagacacagagaatgaagccatgtccaagattgtggaactggaaaagcaactcatgcagaggaacaaggagctggatgtcgttcgggaaatctacaaagatgcaaatactcaagttcacacattaagaaaaatggtcaaagaaaaagaagaagcaattcaaagacagtctaccctggaaaaaaagattcatgagctagagaaacaagggaccattaaaattcagaagaaaggggatggggatatcgccatactgccagttgtggcttctggcacattgtccatggggtcagaagtggtagcaggtaactctgtgggacccacaatgggggccgcttcctcaggacccttgccccctcctccaccaccactgcctccctcatcagacacacctgaaacagtgcaaaatggtccagtaacaccacctatgccaccgccgccgccgccccctcctccacctcctcctcccccaccgccccctccgcctcctcctctcccaggccctgcagctgagactgtaccagctcctcccttagcacctccccttccctctgcacctccgctgcctggaacatcttcacccacagtggttttcaactcaggattagcagctgtgaaaattaagaagccaatcaagacgaagttcagaatgccagtgtttaactgggttgctctgaagcccaatcagatcaatggcacagtcttcaatgaaattgatgatgagcgaattctggaggatttaaatgtggatgaatttgaggaaatattcaagacaaaagcccaaggacctgccattgatctttcttcaagcaaacagaagataccacagaagggatcaaacaaagtgacattactagaagcaaacagggccaaaaatcttgccataactttaaggaaagctggaaagactgctgatgaaatatgtaaagctattcatgtatttgacttgaagacactgcctgtggactttgtggaatgcttgatgcggttcctaccaactgagaatgaagtgaaagtgcttcggctctacgagcgggaaaggaagcctctggaaaacttgtcagatgaagatcggttcatgatgcagtttagtaaaatcgagaggctcatgcagaagatgaccatcatggccttcattgggaactttgctgaaagcattcagatgctgactcctcaactacatgcgattatagcagcatctgtctctataaagtcgtcccaaaaactcaagaaaattctggagatcatcttagcccttggaaactacatgaatagcagtaaaagaggagcagtttatggatttaaacttcagagtttagatctgctcttagatacaaagtcaacagacagaaagcaaacactgttgcactatatatccaatgtggtgaaagaaaaatatcaccaagtgtccctgttttataatgagcttcattatgtggaaaaagctgctgcagtctcccttgagaatgttttgctggatgtcaaggagctccagaggggaatggacttgaccaagagagagtacaccatgcatgaccataacacgctgctgaaggagttcatcctcaacaatgaggggaagctgaagaagctgcaggatgatgccaagatcgcacaggatgcctttgatgatgttgtgaagtattttggagaaaaccccaagacaacaccaccctctgtcttctttcctgtctttgtccggtttgtgaaagcatataagcaagcagaagaggaaaatgagctgaggaaaaagcaggaacaagctctcatggaaaaactcctagagcaagaagctctgatggagcagcaggatccaaagtctccttctcataaatcaaagaggcagcagcaagagttaattgcagaattaagaagacgacaagttaaagataacagacatgtatatgagggaaaagatggtgccattgaagatattatcacagatcttagaaaccaaccatacagacgagccgatgcggtgaggagaagcgtcaggcggcgctttgatgatcagaacttgcgttctgttaatggtgccgaaataacaatgtgaacctgagactggcctgcatgaatacagggtgtgcgtgaatgaaactgcccacatgaactttatgtgctacgatttaactgcagccttgaacacacacaaaaatattcttaagggctcagatttagcaaacacggaagaattttaaaatgagctctcctttcaacccttgttaacaagtgcctaaaaatggaagtacctgttcagattaatcaaagcaataggatttgatttgattaggtatctttttacaccagtatgttatttttaaccaaaatgtaaagttcttattaaactcattacctgccattgtgattgtcccatcatggcccacctggtttcctgatgttgtaaataacatcaatgcatctgctgtgggtcctttgctgagatgtcttcgaaggaattttgttttagccatatccatcaactttgtattttacttgcaatttggaagaaggaaagtcacatgatgaaactccttttgtctataaccaggccctggcaaagtgcaaacaggatgcaactgcagtggcacaaaggtcactcaatcctttgtttccagtttcacattctactacttctgcgctagagaacgatgctctgtgagaggcattcactagtatgaatgtggggatatagtgtataagacttatttgcagtactgtgttcttcagctagaggcagctttttaaataatgcaagtgtatttattagcattaaaattaacatctcagtaatcagcattagcatttctgaggaccattattaattctgagaacagaaattggtgccttgcaaggaagtttactagctctatcaacaagcattcaaggttacatctgctagcagagtagtgttaggaacctggccttactctcctctgacaatcgcaattttttcttattttttataaattcaagaagatacacttggcatcgtgtatcgaggctaagtttttcatgcatttcccagactacttatggagaattgcagtttaagttgctgaaaagtattaacatggtattaagcttaaataatacgtaatgggactagatggcccactaagccactgttattttccttcctctctggcagggcacttgatccattccaaagtcaaaaactggactgaagctaaatttgtacttttcataatatacattctgcttctggcttatcttcttggtacatcaatatattaattgtaaagtttattgtatagtatttaaccgctgaagttcctattttatgttgtgcttatgtgaaccccttggtgaaggtcccttttccttggatgtgtagttatatgatctttttaaatgtacagatattttgctataaaatcggtgcagttttttatggtttttacacttctctttaattcccacctaagcctctgggtaatattgtaaatattgttttaaaatgcatcagcctatgctatacaatctgaatgttattttaacttatagttttttttaatatatatatttaactataaggacagtttagggaacaagttacctaccacatttcactttagtgtacctatttacagaaagattaaactgccacctgcgggcacattcccataaatgtgtactttactttaaaaagaacatgccacgattttgtctttctgtggactcaacattcacttcgattaaaaatagcaatttgaccaagttggacttccactacaaagcagctgttttccaaagttcaatgctgacatatatgtatattaaaataattgcctatttattaatctacaaatagacaacgttggcatgttcttttctgtttgtctattaatgggcctgcttcttagcaatattagaatgttttataaaagcaattcatgttacttttctggtcttttcatggcatatgagcaaataataaactatttacactactattctgtaa

SEQ ID NO: 32 - DNA, 4542 bp, Homo sapiens
  misc_feature: G protein-coupled receptor 176 (isoform 1)
tgggggcgtcctccttcgtccccgcccggctgtcaagctgtgttctagcggccgagggaccgaggggggctaagaaagggggcgcccagccatgcagaggcaaaaaggcgctgcggaacggggtccccgtcgccagtgctgaggcaggaggtcggagccacaagtgaggggctgggaagcaggacccagcacgggcgtcttggcaggcggccgggcgcagggccaggctgctggggacgctcagggctttccacccaagccatgggcgctgtcgggcactcgggggtcccctcgtggctccggccactcggcgtgggcattacgttggcttcacatcgccatccagcctcgaagccaacaggactgaaaaatagcttcggccaaacgttctcctcccgctaaggagaggggtcgagtgcgtcagcccgaggggactggagagggatgccctagccctcgaggggcggaggacccgcggttgaaggaggcagcgggagcggagagcgccctccttgaccatcgaatgcctccttctgtgtttccattcctgtcgagtgggctgggccacgctgaccaccctggaggagggacggacgacgctcggcgggctctgaccgtgccgccttcttgtggctgctgactgggatccaggagggagtgggcatggggcgcagccgcgcctccctccctccccgcctcccgggcgccggggttggcgatgtggagacgtgaggggacccgtcggctgctccggcttctccaggactccgccaggcgcccgcgcgtccctcctcacccggaggaggagaggctccgcgcggggctccgaggcgggcggcgcgcggagccggagtcccagcctcgccatgggacataacgggagctggatctctccaaatgccagcgagccgcacaacgcgtccggcgccgaggctgcgggtgtgaaccgcagcgcgctcggggagttcggcgaggcgcagctgtaccgccagttcaccaccaccgtgcaggtcgtcatcttcataggctcgctgctcggaaacttcatggtgttatggtcaacttgccgcacaaccgtgttcaaatctgtcaccaacaggttcattaaaaacctggcctgctcggggatttgtgccagcctggtctgtgtgcccttcgacatcatcctcagcaccagtcctcactgttgctggtggatctacaccatgctcttctgcaaggtcgtcaaatttttgcacaaagtattctgctctgtgaccatcctcagcttccctgctattgctttggacaggtactactcagtcctctatccactggagaggaaaatatctgatgccaagtcccgtgaactggtgatgtacatctgggcccatgcagtggtggccagtgtccctgtgtttgcagtaaccaatgtggctgacatctatgccacgtccacctgcacggaagtctggagcaactccttgggccacctggtgtacgttctggtgtataacatcaccacggtcattgtgcctgtggtggtggtgttcctcttcttgatactgatccgacgggccctgagtgccagccagaagaagaaggtcatcatagcagcgctccggaccccacagaacaccatctctattccctatgcctcccagcgggaggccgagctgcacgccaccctgctctccatggtgatggtcttcatcttgtgtagcgtgccctatgccaccctggtcgtctaccagactgtgctcaatgtccctgacacttccgtcttcttgctgctcactgctgtttggctgcccaaagtctccctgctggcaaaccctgttctctttcttactgtgaacaaatctgtccgcaagtgcttgatagggaccctggtgcaactacaccaccggtacagtcgccgtaatgtggtcagtacagggagtggcatggctgaggccagcctggaacccagcatacgctcgggtagccagctcctggagatgttccacattgggcagcagcagatctttaagcccacagaggatgaggaagagagtgaggccaagtacattggctcagctgacttccaggccaaggagatatttagcacctgcctggagggagagcaggggccacagtttgcgccctctgccccacccctgagcacagtggactctgtatcccaggtggcaccggcagcccctgtggaacctgaaacattccctgataagtattccctgcagtttggctttgggccttttgagttgcctcctcagtggctctcagagacccgaaacagcaagaagcggctgcttccccccttgggcaacaccccagaagagctgatccagacaaaggtgcccaaggtaggcagggtggagcggaagatgagcagaaacaataaagtgagcatttttccaaaggtggattcctagcaaggattgtaaattcttggaagcaacggggagcttccatattcccaccagagtgtgggaatgctgtggccatgtgattgtatgatctccttgcaactcagtgtgagttgattcctccaatatgggccagatgcttttgaatgatagggaaatctacataaaatccagtgtcctctttattgagggagtatatgtatccatctcagtgatccatgtccttagtgaagtccacattattctctgtggggacaagagctgggcagttttgaatgggtcttgaggtgggtaccccatgtgcactttctgaggatgcctcacttccctgggctctgcagagaacacacagagagaagactttcagagctcacaggagcagggagcaggagcactctaagggaattccaagatcatgatggagcatggtggctccagagaaaatgcctgtttgatgaacttaaacatgtcaaacattttctgttgagaaggtagggatttggtgtcttacactgtttctctggaagccccagtcatatgactcactgtttctcctgatacccttcgtccctttcattgggatgtaggtaaggaatgacgattcctcacctatggtacacatggcgatagatgtgcccgggagtaagggagatattttgtccttgataattctgattttcccttggcatcaccaacgcctcagagagatacacctgcaccctccagtcagggtcagtgttggctggaaaacactgaaaagtcttcgctctgtctttcaccttaaattgtgttttctcaacaaatgagagagaagcttacgggggagatgcctgagagatgcctatggcgctgtagtttttttttcttccctatgatctcacatgaaaggtgctatgtaacaaccagtatgagtcaaatatattgaaaaaatcatcttatgcaaactttaggaattaaaaggtatttttaaaatggagagttagtgtaagctgggtcctttggaaacatcaaactgaaaaggcctgatttggaaaggtgactctgcccaaaaggttggcaagaatctgacaaagatggtttccttccgaggaagactccggaactcaggtgtggccagtctccttttcagtctgtttgtacagctgcggttctctcttaattttggacacagaggaggaacagaacagggagaaataatcattgtagagtgccaaggcaacatctgacccagatgagctcttcacttcctccttccctgtcgttgtagagccagactgggtagaagagggagggcagtgtcctcaactcatcagcctcacaagcaatttgggacccctctggggtggatttcaccaggttgaattagaaccgcagataatacttccctgttagtgaggacaaaccaagcgccagctctgcccttttctctagagtgttgtgttcttgctcttggtacttacaggagctagtctggtgccttgagcaagcttgaagggaagtgggtgtcctcaccagcaaacttccacatctcaactcgtgccctcttttggccacactggccccgtctcttggagggagcccagaccctgtagggagttttgttttcctttcttctcttgggtgtggtgtcttgtgtttctgaatgtgaacccaaagaccctacccctggagaggaagcaccttcctctttgtgttggtctcctcatagcactgtttgctcacagcagaaacggggctgccacagcctcctgcggctctgctgccttctgggccctgcgtgcatggcatctatagctccttgccctgatagtcaatgctgtggcccttcaagcttgtctttcaaagctttcacaatcattacaacttttatcaaggggaataataatctctaggaaaattatgtccactttaggagaatctgtcaagtgtagccactttggtgttgttctgataatatactgtatatgtacaacttaataaattttgatgaggcagaatctggttgggtatgtttcttatatatgtttgaagcagatggctgactactaacaggtcattgccaggtgtatttctatactctttgaagaataacattttaataaaaaattgaaaagcaaaaaaaaaaaaaaaaaaa

SEQ ID NO: 33 - DNA, 4539 bp, Homo sapiens
  misc_feature: G protein-coupled receptor 176 (isoform 2)
tgggggcgtcctccttcgtccccgcccggctgtcaagctgtgttctagcggccgagggaccgaggggggctaagaaagggggcgcccagccatgcagaggcaaaaaggcgctgcggaacggggtccccgtcgccagtgctgaggcaggaggtcggagccacaagtgaggggctgggaagcaggacccagcacgggcgtcttggcaggcggccgggcgcagggccaggctgctggggacgctcagggctttccacccaagccatgggcgctgtcgggcactcgggggtcccctcgtggctccggccactcggcgtgggcattacgttggcttcacatcgccatccagcctcgaagccaacaggactgaaaaatagcttcggccaaacgttctcctcccgctaaggagaggggtcgagtgcgtcagcccgaggggactggagagggatgccctagccctcgaggggcggaggacccgcggttgaaggaggcagcgggagcggagagcgccctccttgaccatcgaatgcctccttctgtgtttccattcctgtcgagtgggctgggccacgctgaccaccctggaggagggacggacgacgctcggcgggctctgaccgtgccgccttcttgtggctgctgactgggatccaggagggagtgggcatggggcgcagccgcgcctccctccctccccgcctcccgggcgccggggttggcgatgtggagacgtgaggggacccgtcggctgctccggcttctccaggactccgccaggcgcccgcgcgtccctcctcacccggaggaggagaggctccgcgcggggctccgaggcgggcggcgcgcggagccggagtcccagcctcgccatgggacataacgggagctggatctctccaaatgccagcgagccgcacaacgcgtccggcgccgaggctgcgggtgtgaaccgcagcgcgctcggggagttcggcgaggcgcagctgtaccgccagttcaccaccaccgtgcaggtcgtcatcttcataggctcgctgctcgagtttggcaacatggaggtcactagaaaacttgataagagcagactgcctgggattaagttcattaaaaacctggcctgctcggggatttgtgccagcctggtctgtgtgcccttcgacatcatcctcagcaccagtcctcactgttgctggtggatctacaccatgctcttctgcaaggtcgtcaaatttttgcacaaagtattctgctctgtgaccatcctcagcttccctgctattgctttggacaggtactactcagtcctctatccactggagaggaaaatatctgatgccaagtcccgtgaactggtgatgtacatctgggcccatgcagtggtggccagtgtccctgtgtttgcagtaaccaatgtggctgacatctatgccacgtccacctgcacggaagtctggagcaactccttgggccacctggtgtacgttctggtgtataacatcaccacggtcattgtgcctgtggtggtggtgttcctcttcttgatactgatccgacgggccctgagtgccagccagaagaagaaggtcatcatagcagcgctccggaccccacagaacaccatctctattccctatgcctcccagcgggaggccgagctgcacgccaccctgctctccatggtgatggtcttcatcttgtgtagcgtgccctatgccaccctggtcgtctaccagactgtgctcaatgtccctgacacttccgtcttcttgctgctcactgctgtttggctgcccaaagtctccctgctggcaaaccctgttctctttcttactgtgaacaaatctgtccgcaagtgcttgatagggaccctggtgcaactacaccaccggtacagtcgccgtaatgtggtcagtacagggagtggcatggctgaggccagcctggaacccagcatacgctcgggtagccagctcctggagatgttccacattgggcagcagcagatctttaagcccacagaggatgaggaagagagtgaggccaagtacattggctcagctgacttccaggccaaggagatatttagcacctgcctggagggagagcaggggccacagtttgcgccctctgccccacccctgagcacagtggactctgtatcccaggtggcaccggcagcccctgtggaacctgaaacattccctgataagtattccctgcagtttggctttgggccttttgagttgcctcctcagtggctctcagagacccgaaacagcaagaagcggctgcttccccccttgggcaacaccccagaagagctgatccagacaaaggtgcccaaggtaggcagggtggagcggaagatgagcagaaacaataaagtgagcatttttccaaaggtggattcctagcaaggattgtaaattcttggaagcaacggggagcttccatattcccaccagagtgtgggaatgctgtggccatgtgattgtatgatctccttgcaactcagtgtgagttgattcctccaatatgggccagatgcttttgaatgatagggaaatctacataaaatccagtgtcctctttattgagggagtatatgtatccatctcagtgatccatgtccttagtgaagtccacattattctctgtggggacaagagctgggcagttttgaatgggtcttgaggtgggtaccccatgtgcactttctgaggatgcctcacttccctgggctctgcagagaacacacagagagaagactttcagagctcacaggagcagggagcaggagcactctaagggaattccaagatcatgatggagcatggtggctccagagaaaatgcctgtttgatgaacttaaacatgtcaaacattttctgttgagaaggtagggatttggtgtcttacactgtttctctggaagccccagtcatatgactcactgtttctcctgatacccttcgtccctttcattgggatgtaggtaaggaatgacgattcctcacctatggtacacatggcgatagatgtgcccgggagtaagggagatattttgtccttgataattctgattttcccttggcatcaccaacgcctcagagagatacacctgcaccctccagtcagggtcagtgttggctggaaaacactgaaaagtcttcgctctgtctttcaccttaaattgtgttttctcaacaaatgagagagaagcttacgggggagatgcctgagagatgcctatggcgctgtagtttttttttcttccctatgatctcacatgaaaggtgctatgtaacaaccagtatgagtcaaatatattgaaaaaatcatcttatgcaaactttaggaattaaaaggtatttttaaaatggagagttagtgtaagctgggtcctttggaaacatcaaactgaaaaggcctgatttggaaaggtgactctgcccaaaaggttggcaagaatctgacaaagatggtttccttccgaggaagactccggaactcaggtgtggccagtctccttttcagtctgtttgtacagctgcggttctctcttaattttggacacagaggaggaacagaacagggagaaataatcattgtagagtgccaaggcaacatctgacccagatgagctcttcacttcctccttccctgtcgttgtagagccagactgggtagaagagggagggcagtgtcctcaactcatcagcctcacaagcaatttgggacccctctggggtggatttcaccaggttgaattagaaccgcagataatacttccctgttagtgaggacaaaccaagcgccagctctgcccttttctctagagtgttgtgttcttgctcttggtacttacaggagctagtctggtgccttgagcaagcttgaagggaagtgggtgtcctcaccagcaaacttccacatctcaactcgtgccctcttttggccacactggccccgtctcttggagggagcccagaccctgtagggagttttgttttcctttcttctcttgggtgtggtgtcttgtgtttctgaatgtgaacccaaagaccctacccctggagaggaagcaccttcctctttgtgttggtctcctcatagcactgtttgctcacagcagaaacggggctgccacagcctcctgcggctctgctgccttctgggccctgcgtgcatggcatctatagctccttgccctgatagtcaatgctgtggcccttcaagcttgtctttcaaagctttcacaatcattacaacttttatcaaggggaataataatctctaggaaaattatgtccactttaggagaatctgtcaagtgtagccactttggtgttgttctgataatatactgtatatgtacaacttaataaattttgatgaggcagaatctggttgggtatgtttcttatatatgtttgaagcagatggctgactactaacaggtcattgccaggtgtatttctatactctttgaagaataacattttaataaaaaattgaaaagcaaaaaaaaaaaaaaaaaaa

SEQ ID NO: 34 - DNA, 3700 bp, Homo sapiens
  misc_feature: G protein-coupled receptor 176 (isoform 3)
cattctgatgcccgagtccaagtggcttttccagcgacacatctttggtctttgttctcagtgttgggggttgcgttgtgaggtgttgtctcttcatgagaaggcagtgtgacgtagtgatcacatcccaggctctggagttcaactgcttctgtctgaatgccagctccactgcttcttatttctagaactttgggaaacttcatggtgttatggtcaacttgccgcacaaccgtgttcaaatctgtcaccaacaggttcattaaaaacctggcctgctcggggatttgtgccagcctggtctgtgtgcccttcgacatcatcctcagcaccagtcctcactgttgctggtggatctacaccatgctcttctgcaaggtcgtcaaatttttgcacaaagtattctgctctgtgaccatcctcagcttccctgctattgctttggacaggtactactcagtcctctatccactggagaggaaaatatctgatgccaagtcccgtgaactggtgatgtacatctgggcccatgcagtggtggccagtgtccctgtgtttgcagtaaccaatgtggctgacatctatgccacgtccacctgcacggaagtctggagcaactccttgggccacctggtgtacgttctggtgtataacatcaccacggtcattgtgcctgtggtggtggtgttcctcttcttgatactgatccgacgggccctgagtgccagccagaagaagaaggtcatcatagcagcgctccggaccccacagaacaccatctctattccctatgcctcccagcgggaggccgagctgcacgccaccctgctctccatggtgatggtcttcatcttgtgtagcgtgccctatgccaccctggtcgtctaccagactgtgctcaatgtccctgacacttccgtcttcttgctgctcactgctgtttggctgcccaaagtctccctgctggcaaaccctgttctctttcttactgtgaacaaatctgtccgcaagtgcttgatagggaccctggtgcaactacaccaccggtacagtcgccgtaatgtggtcagtacagggagtggcatggctgaggccagcctggaacccagcatacgctcgggtagccagctcctggagatgttccacattgggcagcagcagatctttaagcccacagaggatgaggaagagagtgaggccaagtacattggctcagctgacttccaggccaaggagatatttagcacctgcctggagggagagcaggggccacagtttgcgccctctgccccacccctgagcacagtggactctgtatcccaggtggcaccggcagcccctgtggaacctgaaacattccctgataagtattccctgcagtttggctttgggccttttgagttgcctcctcagtggctctcagagacccgaaacagcaagaagcggctgcttccccccttgggcaacaccccagaagagctgatccagacaaaggtgcccaaggtaggcagggtggagcggaagatgagcagaaacaataaagtgagcatttttccaaaggtggattcctagcaaggattgtaaattcttggaagcaacggggagcttccatattcccaccagagtgtgggaatgctgtggccatgtgattgtatgatctccttgcaactcagtgtgagttgattcctccaatatgggccagatgcttttgaatgatagggaaatctacataaaatccagtgtcctctttattgagggagtatatgtatccatctcagtgatccatgtccttagtgaagtccacattattctctgtggggacaagagctgggcagttttgaatgggtcttgaggtgggtaccccatgtgcactttctgaggatgcctcacttccctgggctctgcagagaacacacagagagaagactttcagagctcacaggagcagggagcaggagcactctaagggaattccaagatcatgatggagcatggtggctccagagaaaatgcctgtttgatgaacttaaacatgtcaaacattttctgttgagaaggtagggatttggtgtcttacactgtttctctggaagccccagtcatatgactcactgtttctcctgatacccttcgtccctttcattgggatgtaggtaaggaatgacgattcctcacctatggtacacatggcgatagatgtgcccgggagtaagggagatattttgtccttgataattctgattttcccttggcatcaccaacgcctcagagagatacacctgcaccctccagtcagggtcagtgttggctggaaaacactgaaaagtcttcgctctgtctttcaccttaaattgtgttttctcaacaaatgagagagaagcttacgggggagatgcctgagagatgcctatggcgctgtagtttttttttcttccctatgatctcacatgaaaggtgctatgtaacaaccagtatgagtcaaatatattgaaaaaatcatcttatgcaaactttaggaattaaaaggtatttttaaaatggagagttagtgtaagctgggtcctttggaaacatcaaactgaaaaggcctgatttggaaaggtgactctgcccaaaaggttggcaagaatctgacaaagatggtttccttccgaggaagactccggaactcaggtgtggccagtctccttttcagtctgtttgtacagctgcggttctctcttaattttggacacagaggaggaacagaacagggagaaataatcattgtagagtgccaaggcaacatctgacccagatgagctcttcacttcctccttccctgtcgttgtagagccagactgggtagaagagggagggcagtgtcctcaactcatcagcctcacaagcaatttgggacccctctggggtggatttcaccaggttgaattagaaccgcagataatacttccctgttagtgaggacaaaccaagcgccagctctgcccttttctctagagtgttgtgttcttgctcttggtacttacaggagctagtctggtgccttgagcaagcttgaagggaagtgggtgtcctcaccagcaaacttccacatctcaactcgtgccctcttttggccacactggccccgtctcttggagggagcccagaccctgtagggagttttgttttcctttcttctcttgggtgtggtgtcttgtgtttctgaatgtgaacccaaagaccctacccctggagaggaagcaccttcctctttgtgttggtctcctcatagcactgtttgctcacagcagaaacggggctgccacagcctcctgcggctctgctgccttctgggccctgcgtgcatggcatctatagctccttgccctgatagtcaatgctgtggcccttcaagcttgtctttcaaagctttcacaatcattacaacttttatcaaggggaataataatctctaggaaaattatgtccactttaggagaatctgtcaagtgtagccactttggtgttgttctgataatatactgtatatgtacaacttaataaattttgatgaggcagaatctggttgggtatgtttcttatatatgtttgaagcagatggctgactactaacaggtcattgccaggtgtatttctatactctttgaagaataacattttaataaaaaattgaaaagcaaaaaaaaaaaaaaaaaaa

SEQ ID NO: 35 - DNA, 1771 bp, Homo sapiens
  misc_feature: MyoD family inhibitor (isoform 1)
atcgctgggacgtggccgcgggtgccgagagcgctgccggcgccgtgggggccatcccggtcctggccccgacggcgccccaggacctgcgatagccaaacttttgcagagtttggacaggcaaaggaaaacgtgcagcccgcggatctccgggcctcagagagcagggagtcggggagactgaggccccgctccgagagcgcggaggaagcgcgcccagccggcttcctgtgggggctcgggcctcgggcgccccgcggacagacgtgtccggctcctggctgggccaagcccggcgcgggggaggggacccgcagaggggcgactgagaaggtccggggccgatgtaccaggtgagcggccagcgcccctctggctgcgacgcgccctatggagcccccagcgcagccccgggcccagcccagaccctatccctccttcctgggctggaggtagtaacaggatccactcaccctgcggaggcagcaccagaggagggctccctggaggaggcggcaacccccatgccccaaggcaatggccctggcatcccccagggcctggacagcactgacctcgacgtccccacagaagctgtgacatgccagcctcaggggaaccccttgggctgcaccccacttctgccgaatgactctggccacccctcagagctgggcggcaccagacgggcggggaatggtgccctgggtggccccaaggcccaccggaagttgcagacacacccatctctcgccagccagggcagcaagaagagtaagagcagcagcaaatccaccacctcccagatccccctccaggcacaggaagactgctgtgtccactgcatcctgtcctgcctgttctgcgagttcctgacgctgtgcaacatcgtcctggactgcgccacctgtggctcctgcagctcggaggactcgtgcctctgctgctgctgctgtggctctggcgagtgtgccgactgcgacctgccctgcgacctggactgcggcatcctggatgcctgctgcgagtccgcggactgcctggagatctgcatggagtgctgtgggctctgcttctcctcctgagcctctgtcgggggctaagccagcctggcgcccctgcagattccagcagggtccctctgagtggggccaggcccaggactgtcacacaaggcttgagaagccccctctccctggtcctctcctacccacccatgtcctctcagaaccccagccttgaaaatagtggggggcactcagaggggccacctcctcagccgtgggtggtgggcccatggcagagaagcctgaactctttactgggttaccaggttcatacattgctgaggacctgacaggacaacctaggggcagggctggggtggggaccgcagggggcagccagggctggggaacactgtgaaagttacttggggagggtgggccggtggggccgtagctctctacctctccctgctcctggtgcctgcctctctcctccaccccaggcttagaggacagaaaaatgtgaagagacgccccacccaccctcagccagccctctccagtctcctttcctaggcttttttgggggcctaacccacgcagtgaccccagagggcagggctaggcgagagcctggggtggggcgggagggggaacagtatggaaaagactggaaggggaaaggaagggaagggagggagggtctgttctatctgttgctgtaaataaagatatttgtccatctcaaaaaaaaaaaaaaaaaa

SEQ ID NO: 36 - DNA, 1451 bp, Homo sapiens
  misc_feature: MyoD family inhibitor (isoform 2)
ggagagaaggaagaaggaaggggcgaacggcgtgagctggcgccgaaatgggagaaagcagcgagtgagaggggaaggggcgccaggcgagcacccgggagccagcgggacctgggcaggggcgcccggagcaggcgcgcatggcgggccccgcgcggggatccggctggaagagagcgtagcacggctcgcacgagtccggggccgatgtaccaggtgagcggccagcgcccctctggctgcgacgcgccctatggagcccccagcgcagccccgggcccaggccagcctcaggggaaccccttgggctgcaccccacttctgccgaatgactctggccacccctcagagctgggcggcaccagacgggcggggaatggtgccctgggtggccccaaggcccaccggaagttgcagacacacccatctctcgccagccagggcagcaagaagagtaagagcagcagcaaatccaccacctcccagatccccctccaggcacaggaagactgctgtgtccactgcatcctgtcctgcctgttctgcgagttcctgacgctgtgcaacatcgtcctggactgcgccacctgtggctcctgcagctcggaggactcgtgcctctgctgctgctgctgtggctctggcgagtgtgccgactgcgacctgccctgcgacctggactgcggcatcctggatgcctgctgcgagtccgcggactgcctggagatctgcatggagtgctgtgggctctgcttctcctcctgagcctctgtcgggggctaagccagcctggcgcccctgcagattccagcagggtccctctgagtggggccaggcccaggactgtcacacaaggcttgagaagccccctctccctggtcctctcctacccacccatgtcctctcagaaccccagccttgaaaatagtggggggcactcagaggggccacctcctcagccgtgggtggtgggcccatggcagagaagcctgaactctttactgggttaccaggttcatacattgctgaggacctgacaggacaacctaggggcagggctggggtggggaccgcagggggcagccagggctggggaacactgtgaaagttacttggggagggtgggccggtggggccgtagctctctacctctccctgctcctggtgcctgcctctctcctccaccccaggcttagaggacagaaaaatgtgaagagacgccccacccaccctcagccagccctctccagtctcctttcctaggcttttttgggggcctaacccacgcagtgaccccagagggcagggctaggcgagagcctggggtggggcgggagggggaacagtatggaaaagactggaaggggaaaggaagggaagggagggagggtctgttctatctgttgctgtaaataaagatatttgtccatctcaaaaaaaaaaaaaaaaaa

SEQ ID NO: 37 - DNA, 4774 bp, Homo sapiens
  misc_feature: protocadherin gamma subfamily A, 12 (isoform 1)
acgcgcctgaagcacaaagcagatagctaggaatgaaccatccctgggagtatgtggaaacaacggaggagctctgacttcccaactgtcccattctatgggcgaaggaactgctcctgacttcagtggttaagggcagaattgaaaataattctggaggaagataagaatgattcctgcgcgactgcaccgggactacaaagggcttgtcctgctgggaatcctcctggggactctgtgggagaccggatgcacccagatacgctattcagttccggaagagctggagaaaggctctagggtgggcgacatctccagggacctggggctggagccccgggagctcgcggagcgcggagtccgcatcatccccagaggtaggacgcagcttttcgccctgaatccgcgcagcggcagcttggtcacggcgggcaggatagaccgggaggagctctgtatgggggccatcaagtgtcaattaaatctagacattctgatggaggataaagtgaaaatatatggagtagaagtagaagtaagggacattaacgacaatgcgccttactttcgtgaaagtgaattagaaataaaaattagtgaaaatgcagccactgagatgcggttccctctaccccacgcctgggatccggatatcgggaagaactctctgcagagctacgagctcagcccgaacactcacttctccctcatcgtgcaaaatggagccgacggtagtaagtaccccgaattggtgctgaaacgcgccctggaccgcgaagaaaaggctgctcaccacctggtccttacggcctccgacgggggcgacccggtgcgcacaggcaccgcgcgcatccgcgtgatggttctggatgcgaacgacaacgcaccagcgtttgctcagcccgagtaccgcgcgagcgttccggagaatctggccttgggcacgcagctgcttgtagtcaacgctaccgaccctgacgaaggagtcaatgcggaagtgaggtattccttccggtatgtggacgacaaggcggcccaagttttcaaactagattgtaattcagggacaatatcaacaataggggagttggaccacgaggagtcaggattctaccagatggaagtgcaagcaatggataatgcaggatattctgcgcgagccaaagtcctgatcactgttctggacgtgaacgacaatgccccagaagtggtcctcacctctctcgccagctcggttcccgaaaactctcccagagggacattaattgcccttttaaatgtaaatgaccaagattctgaggaaaacggacaggtgatctgtttcatccaaggaaatctgccctttaaattagaaaaatcttacggaaattactatagtttagtcacagacatagtcttggatagggaacaggttcctagctacaacatcacagtgaccgccactgaccggggaaccccgcccctatccacggaaactcatatctcgctgaacgtggcagacaccaacgacaacccgccggtcttccctcaggcctcctattccgcttatatcccagagaacaatcccagaggagtttccctcgtctctgtgaccgcccacgaccccgactgtgaagagaacgcccagatcacttattccctggctgagaacaccatccaaggggcaagcctatcgtcctacgtgtccatcaactccgacactggggtactgtatgcgctgagctccttcgactacgagcagttccgagacttgcaagtgaaagtgatggcgcgggacaacgggcacccgcccctcagcagcaacgtgtcgttgagcctgttcgtgctggaccagaacgacaatgcgcccgagatcctgtaccccgccctccccacggacggttccactggcgtggagctggctccccgctccgcagagcccggctacctggtgaccaaggtggtggcggtggacagagactccggccagaacgcctggctgtcctaccgtctgctcaaggccagcgagccgggactcttctcggtgggtctgcacacgggcgaggtgcgcacggcgcgagccctgctggacagagacgcgctcaagcagagcctcgtagtggccgtccaggaccacggccagccccctctctccgccactgtcacgctcaccgtggccgtggccgacagcatcccccaagtcctggcggacctcggcagcctcgagtctccagctaactctgaaacctcagacctcactctgtacctggtggtagcggtggccgcggtctcctgcgtcttcctggccttcgtcatcttgctgctggcgctcaggctgcggcgctggcacaagtcacgcctgctgcaggcttcaggaggcggcttgacaggagcgccggcgtcgcactttgtgggcgtggacggggtgcaggctttcctgcagacctattcccacgaggtttccctcaccacggactcgcggaagagtcacctgatcttcccccagcccaactatgcagacatgctcgtcagccaggagagctttgaaaaaagcgagccccttttgctgtcaggtgattcggtattttctaaagacagtcatgggttaattgagcaagccccgcccaacacggactggcgtttctctcaggcccagagacccggcaccagcggctcccaaaatggcgatgacaccggcacctggcccaacaaccagtttgacacagagatgctgcaagccatgatcttggcgtccgccagtgaagctgctgatgggagctccaccctgggagggggtgccggcaccatgggattgagcgcccgctacggaccccagttcaccctgcagcacgtgcccgactaccgccagaatgtctacatcccaggcagcaatgccacactgaccaacgcagctggcaagcgggatggcaaggccccagcaggtggcaatggcaacaagaagaagtcgggcaagaaggagaagaagtaacatggaggccaggccaagagccacagggcggcctctccccaaccagcccagcttctccttacctgcacccaggcctcagagtttcagggctaacccccagaatactggtaggggccaaggccatgctccccttgggaaacagaaacaagtgcccagtcagcacctaccccttcccccccagggggttgaatatgcaaaagcagttccgctgggaacccccatccaatcaactgctgtacccatgggggtagtggggttactgtagacaccaagaaccatttgccacaccccgtttagttacagctgaactcctccatcttccaaatcaatcaggcccatccatcccatgcctccctcctccccaccccactccaacagttcctctttcccgagtaaggtggttggggtgttgaagtaccaagtaacctacaagcctcctagttctgaaaagttggaagggcatcatgacctcttggcctctcctttgattctcaatcttcccccaaagcatggtttggtgccagccccttcacctccttccagagcccaagatcaatgctcaagttttggaggacatgatcaccatccccatggtactgatgcttgctggatttagggagggcattttgctaccaagcctcttcccaacgccctggggaccagtcttctgttttgtttttcattgtttgacgtttccactgcatgccttgacttcccccacctcctcctcaaacaagagactccactgcatgttccaagacagtatggggtggtaagataaggaagggaagtgtgtggatgtggatggtgggggcatggacaaagcttgacacatcaagttatcaaggccttggaggaggctctgtatgtcctcaggggactgacaacatcctccagattccagccataaaccaataactaggctggacccttcccactacataatagggctcagcccaggcagccagctttgggctgagctaacaggaccaatggattaaactggcatttcagtccaaggaagctcgaagcaggtttaggaccaggtccccttgagaggtcagaggggcctctgtgggtgctgggtactccagaggtgccactggtggaagggtcagcggagccccagcaggaagggtgggccagccaggccattcttagtccctgggttggggaggcagggagctagggcagggaccaaatgaacagaaagtctcagcccaggatggggcttcttcaacagggcccctgccctcctgaagcctcagtccttcaccttgccaggtgccgtttctcttccgtgaaggccactgcccaggtccccagtgcgccccctagtggccatagcctggttaaagttccccagtgcctccttgtgcatagaccttcttctcccacccccttctgcccctgggtccccggccatccagcggggctgccagagaaccccagacctgcccttacagtagtgtagcgccccctccctctttcggctggtgtagaatagccagtagtgtagtgcggtgtgcttttacgtgatggcgggtgggcagcgggcggcgggctccgcgcagccgtctgtccttgatctgcccgcggcggcccgtgttgtgttttgtgctgtgtccacgcgctaaggcgaccccctcccccgtactgacttctcctataagcgcttctcttcgcatagtcacgtagctcccaccccaccctcttcctgtgtctcacgcaagttttatactctaatatttatatggctttttttcttcgacaaaaaaataataaaacgtttcttctgaaaagctg

SEQ ID NO: 38 - DNA, 2632 bp, Homo sapiens
  misc_feature: protocadherin gamma subfamily A, 12 (isoform 2)
acgcgcctgaagcacaaagcagatagctaggaatgaaccatccctgggagtatgtggaaacaacggaggagctctgacttcccaactgtcccattctatgggcgaaggaactgctcctgacttcagtggttaagggcagaattgaaaataattctggaggaagataagaatgattcctgcgcgactgcaccgggactacaaagggcttgtcctgctgggaatcctcctggggactctgtgggagaccggatgcacccagatacgctattcagttccggaagagctggagaaaggctctagggtgggcgacatctccagggacctggggctggagccccgggagctcgcggagcgcggagtccgcatcatccccagaggtaggacgcagcttttcgccctgaatccgcgcagcggcagcttggtcacggcgggcaggatagaccgggaggagctctgtatgggggccatcaagtgtcaattaaatctagacattctgatggaggataaagtgaaaatatatggagtagaagtagaagtaagggacattaacgacaatgcgccttactttcgtgaaagtgaattagaaataaaaattagtgaaaatgcagccactgagatgcggttccctctaccccacgcctgggatccggatatcgggaagaactctctgcagagctacgagctcagcccgaacactcacttctccctcatcgtgcaaaatggagccgacggtagtaagtaccccgaattggtgctgaaacgcgccctggaccgcgaagaaaaggctgctcaccacctggtccttacggcctccgacgggggcgacccggtgcgcacaggcaccgcgcgcatccgcgtgatggttctggatgcgaacgacaacgcaccagcgtttgctcagcccgagtaccgcgcgagcgttccggagaatctggccttgggcacgcagctgcttgtagtcaacgctaccgaccctgacgaaggagtcaatgcggaagtgaggtattccttccggtatgtggacgacaaggcggcccaagttttcaaactagattgtaattcagggacaatatcaacaataggggagttggaccacgaggagtcaggattctaccagatggaagtgcaagcaatggataatgcaggatattctgcgcgagccaaagtcctgatcactgttctggacgtgaacgacaatgccccagaagtggtcctcacctctctcgccagctcggttcccgaaaactctcccagagggacattaattgcccttttaaatgtaaatgaccaagattctgaggaaaacggacaggtgatctgtttcatccaaggaaatctgccctttaaattagaaaaatcttacggaaattactatagtttagtcacagacatagtcttggatagggaacaggttcctagctacaacatcacagtgaccgccactgaccggggaaccccgcccctatccacggaaactcatatctcgctgaacgtggcagacaccaacgacaacccgccggtcttccctcaggcctcctattccgcttatatcccagagaacaatcccagaggagtttccctcgtctctgtgaccgcccacgaccccgactgtgaagagaacgcccagatcacttattccctggctgagaacaccatccaaggggcaagcctatcgtcctacgtgtccatcaactccgacactggggtactgtatgcgctgagctccttcgactacgagcagttccgagacttgcaagtgaaagtgatggcgcgggacaacgggcacccgcccctcagcagcaacgtgtcgttgagcctgttcgtgctggaccagaacgacaatgcgcccgagatcctgtaccccgccctccccacggacggttccactggcgtggagctggctccccgctccgcagagcccggctacctggtgaccaaggtggtggcggtggacagagactccggccagaacgcctggctgtcctaccgtctgctcaaggccagcgagccgggactcttctcggtgggtctgcacacgggcgaggtgcgcacggcgcgagccctgctggacagagacgcgctcaagcagagcctcgtagtggccgtccaggaccacggccagccccctctctccgccactgtcacgctcaccgtggccgtggccgacagcatcccccaagtcctggcggacctcggcagcctcgagtctccagctaactctgaaacctcagacctcactctgtacctggtggtagcggtggccgcggtctcctgcgtcttcctggccttcgtcatcttgctgctggcgctcaggctgcggcgctggcacaagtcacgcctgctgcaggcttcaggaggcggcttgacaggagcgccggcgtcgcactttgtgggcgtggacggggtgcaggctttcctgcagacctattcccacgaggtttccctcaccacggactcgcggaagagtcacctgatcttcccccagcccaactatgcagacatgctcgtcagccaggagagctttgaaaaaagcgagccccttttgctgtcaggtgattcggtattttctaaagacagtcatgggttaattgaggtgagtttatatcaaatcttctttcttttttttttttaa

SEQ ID NO: 39 - DNA, 4605 bp, Homo sapiens
  misc_feature: protocadherin gamma subfamily A, 6 (isoform 1)
atggcgcctccgcagaggcatccgcagcgcagcgagcaggtcctgctcctcacgctcctggggacgctgtggggggccgcggcagcgcagatccgctactctattcccgaggagctggagaaaggctccttcgtaggcaacatcgtcaaggatctgggactggagccccaggagttggcggagcacggagtccgcatcgtctccagaggtaggatgcagcttttctctctgaatccgcgaaacggcagcttggtcaccgcgggtaggatagaccgcgaggagctctgtgctcagagcccgcggtgtctggtgagttttaacatccttgtcgaggataaactgaatctttatcccgtggaagtggaaatagtggacattaatgacaatacaccccgattcttaaaggaagaattggaagtgaaaattctcgaaaacgcagctccatcctctcgttttccactaatggaggtctatgaccctgatgtgggaatgaactcccttcagggatttaagctcagtggtaatagtcacttctcagtggacgtgcaaagcgaagcccatgggcccaagtacccggagctggtgctggagggcacactggaccgggaaggagaagccgtttaccgcctggtccttactgccatggatggcggcgaccctgtccgctcaagcgtcgcccaaattctggtaacagttctagatgtgaatgacaacactccaatgtttactcagcctgtctaccgtgtaagtgttcctgaaaacctgccagtaggcacaccagtgttggcagtgactgccaccgaccaggatgaaggagtccacggggaagtaacttattcctttgtgaagattacagaaaagatctcacaaattttctgtttgaatgttttgactggagaaatttcaacttctgcaaatctagactatgaggactcgagtttttatgagctgggtgttgaagcccgggatgggccaggtcttcgagacagagcgaaagtcttaataactatcttggatgtcaatgataatgtaccagaagtggttgttacatctggaagcagaacaattgctgaaagtgcacctccaggaacagtaatcgccctttttcaagtgttcgatcgagactctggcctgaatggcctggtaacctgttccatcccgagaagtctcccatttgaattggaaaaatcagttggcaattattatcgattagtgacaaatgcagctctagaccgggaagaggtattcttgtacaacatcactgtgacagccacggacaaaggaacaccacctctgtctacagaaacaatcatctctctaaatgtggcagacaccaacgacaacccgcccaccttcccccattcatcctactcagtctatgtccttgaaaacaaccccaggggtgcctccatcttctctgtgaatgcactggaccctgacgtggaccagaacgcccaagtctcctactcactggcagaagacaccctccagggggcgcccctgtcctcctacgtgtccatcaactccgacactgggattctgtacgccctgcgctccttcgactatgagcagttgagagacctacagctgtgggtgacagccagcgacagcggggacccgcctcttagcagcaacgtgtcactgagcctgtttgtgctggaccagaatgacaatgcgcccgagatcctgtaccccgccctccccacagacggttccactggcgtggagctggcgccccgctccgcagagcccggctacctggtgaccaaggtggtggcggtggacagagactcgggccagaacgcctggctgtcctaccgcctgctcaaggccagcgagccaggacttttctcagtgggcctgcacacgggcgaggtgcgcacggcgcgcgccctgctggacagagacgcgctcaagcagagcctagtggtggccgtccaggaccacggccagccccctctctccgccactgtcacgctcaccgtggccgtggccgacaggatccccgacatcctggccgacctgggcagcctcgagccctccgccaaacccaacgattcggacctcactctgtacctggtggtggcggtggccgcggtctcctgcgtcttcctggccttcgtcatcgtgctgctggcgctcagactgcagcgctggcacaagtcacgcctgctgcaggcttcgggaggtggcttagcgagcatgcccggctcgcactttgtgggcgtggaaggggttcgggctttcctgcagacctattcccacgaggtctcactcactgcagactcgcgtaagagtcatctgattttcccccagcccaactatgccgacacgcttatcaaccaggagagctatgagaaaagcgagcctcttctgataactcaggatttacttgaaacgaaaggagaacccaggcaacttcagcaagccccgcccaacacggactggcgtttctctcaggcccagagacccggcaccagcggctcccaaaatggcgatgacaccggcacctggcccaacaaccagtttgacacagagatgctgcaagccatgatcttggcgtccgccagtgaagctgctgatgggagctccaccctgggagggggtgccggcaccatgggattgagcgcccgctacggaccccagttcaccctgcagcacgtgcccgactaccgccagaatgtctacatcccaggcagcaatgccacactgaccaacgcagctggcaagcgggatggcaaggccccagcaggtggcaatggcaacaagaagaagtcgggcaagaaggagaagaagtaacatggaggccaggccaagagccacagggcggcctctccccaaccagcccagcttctccttacctgcacccaggcctcagagtttcagggctaacccccagaatactggtaggggccaaggccatgctccccttgggaaacagaaacaagtgcccagtcagcacctaccccttcccccccagggggttgaatatgcaaaagcagttccgctgggaacccccatccaatcaactgctgtacccatgggggtagtggggttactgtagacaccaagaaccatttgccacaccccgtttagttacagctgaactcctccatcttccaaatcaatcaggcccatccatcccatgcctccctcctccccaccccactccaacagttcctctttcccgagtaaggtggttggggtgttgaagtaccaagtaacctacaagcctcctagttctgaaaagttggaagggcatcatgacctcttggcctctcctttgattctcaatcttcccccaaagcatggtttggtgccagccccttcacctccttccagagcccaagatcaatgctcaagttttggaggacatgatcaccatccccatggtactgatgcttgctggatttagggagggcattttgctaccaagcctcttcccaacgccctggggaccagtcttctgttttgtttttcattgtttgacgtttccactgcatgccttgacttcccccacctcctcctcaaacaagagactccactgcatgttccaagacagtatggggtggtaagataaggaagggaagtgtgtggatgtggatggtgggggcatggacaaagcttgacacatcaagttatcaaggccttggaggaggctctgtatgtcctcaggggactgacaacatcctccagattccagccataaaccaataactaggctggacccttcccactacataatagggctcagcccaggcagccagctttgggctgagctaacaggaccaatggattaaactggcatttcagtccaaggaagctcgaagcaggtttaggaccaggtccccttgagaggtcagaggggcctctgtgggtgctgggtactccagaggtgccactggtggaagggtcagcggagccccagcaggaagggtgggccagccaggccattcttagtccctgggttggggaggcagggagctagggcagggaccaaatgaacagaaagtctcagcccaggatggggcttcttcaacagggcccctgccctcctgaagcctcagtccttcaccttgccaggtgccgtttctcttccgtgaaggccactgcccaggtccccagtgcgccccctagtggccatagcctggttaaagttccccagtgcctccttgtgcatagaccttcttctcccacccccttctgcccctgggtccccggccatccagcggggctgccagagaaccccagacctgcccttacagtagtgtagcgccccctccctctttcggctggtgtagaatagccagtagtgtagtgcggtgtgcttttacgtgatggcgggtgggcagcgggcggcgggctccgcgcagccgtctgtccttgatctgcccgcggcggcccgtgttgtgttttgtgctgtgtccacgcgctaaggcgaccccctcccccgtactgacttctcctataagcgcttctcttcgcatagtcacgtagctcccaccccaccctcttcctgtgtctcacgcaagttttatactctaatatttatatggctttttttcttcgacaaaaaaataataaaacgtttcttctgaaaagctg

SEQ ID NO: 40 - DNA, 2457 bp, Homo sapiens
  misc_feature: protocadherin gamma subfamily A, 6 (isoform 2)
atggcgcctccgcagaggcatccgcagcgcagcgagcaggtcctgctcctcacgctcctggggacgctgtggggggccgcggcagcgcagatccgctactctattcccgaggagctggagaaaggctccttcgtaggcaacatcgtcaaggatctgggactggagccccaggagttggcggagcacggagtccgcatcgtctccagaggtaggatgcagcttttctctctgaatccgcgaaacggcagcttggtcaccgcgggtaggatagaccgcgaggagctctgtgctcagagcccgcggtgtctggtgagttttaacatccttgtcgaggataaactgaatctttatcccgtggaagtggaaatagtggacattaatgacaatacaccccgattcttaaaggaagaattggaagtgaaaattctcgaaaacgcagctccatcctctcgttttccactaatggaggtctatgaccctgatgtgggaatgaactcccttcagggatttaagctcagtggtaatagtcacttctcagtggacgtgcaaagcgaagcccatgggcccaagtacccggagctggtgctggagggcacactggaccgggaaggagaagccgtttaccgcctggtccttactgccatggatggcggcgaccctgtccgctcaagcgtcgcccaaattctggtaacagttctagatgtgaatgacaacactccaatgtttactcagcctgtctaccgtgtaagtgttcctgaaaacctgccagtaggcacaccagtgttggcagtgactgccaccgaccaggatgaaggagtccacggggaagtaacttattcctttgtgaagattacagaaaagatctcacaaattttctgtttgaatgttttgactggagaaatttcaacttctgcaaatctagactatgaggactcgagtttttatgagctgggtgttgaagcccgggatgggccaggtcttcgagacagagcgaaagtcttaataactatcttggatgtcaatgataatgtaccagaagtggttgttacatctggaagcagaacaattgctgaaagtgcacctccaggaacagtaatcgccctttttcaagtgttcgatcgagactctggcctgaatggcctggtaacctgttccatcccgagaagtctcccatttgaattggaaaaatcagttggcaattattatcgattagtgacaaatgcagctctagaccgggaagaggtattcttgtacaacatcactgtgacagccacggacaaaggaacaccacctctgtctacagaaacaatcatctctctaaatgtggcagacaccaacgacaacccgcccaccttcccccattcatcctactcagtctatgtccttgaaaacaaccccaggggtgcctccatcttctctgtgaatgcactggaccctgacgtggaccagaacgcccaagtctcctactcactggcagaagacaccctccagggggcgcccctgtcctcctacgtgtccatcaactccgacactgggattctgtacgccctgcgctccttcgactatgagcagttgagagacctacagctgtgggtgacagccagcgacagcggggacccgcctcttagcagcaacgtgtcactgagcctgtttgtgctggaccagaatgacaatgcgcccgagatcctgtaccccgccctccccacagacggttccactggcgtggagctggcgccccgctccgcagagcccggctacctggtgaccaaggtggtggcggtggacagagactcgggccagaacgcctggctgtcctaccgcctgctcaaggccagcgagccaggacttttctcagtgggcctgcacacgggcgaggtgcgcacggcgcgcgccctgctggacagagacgcgctcaagcagagcctagtggtggccgtccaggaccacggccagccccctctctccgccactgtcacgctcaccgtggccgtggccgacaggatccccgacatcctggccgacctgggcagcctcgagccctccgccaaacccaacgattcggacctcactctgtacctggtggtggcggtggccgcggtctcctgcgtcttcctggccttcgtcatcgtgctgctggcgctcagactgcagcgctggcacaagtcacgcctgctgcaggcttcgggaggtggcttagcgagcatgcccggctcgcactttgtgggcgtggaaggggttcgggctttcctgcagacctattcccacgaggtctcactcactgcagactcgcgtaagagtcatctgattttcccccagcccaactatgccgacacgcttatcaaccaggagagctatgagaaaagcgagcctcttctgataactcaggatttacttgaaacgaaaggagaacccaggcaacttcaggtgagtttctttccgcctaagcgggaagagtaa

SEQ ID NO: 41 - DNA, 4599 bp, Homo sapiens
  misc_feature: protocadherin gamma subfamily B, 6 (isoform 1)
atgggagggagctgcgcgcagaggcgccgggccggcccgcggcaggtgctatttcctttgctgctgcctttgttctaccccaccctgagtgagccgatccgctactcgattccggaggagctggccaagggctcggtggtggggaacctcgctaaggatctagggctcagtgtcctggatgtgtcggctcgcaagctgcgagtgagcgcggagaagctgcacttcagcgtagacgcggagagcggggacttacttgtgaagaaccgaatagaccgtgagcaaatatgcaaagagagaagaagatgtgagttgcaattggaagctgtggtggaaaatcctttaaatatttttcatgtcattgtggtgattgaggatgttaatgaccacgcccctcaatttgataaaaaggaaatacatttagaaattttcgaatctgcatccgctggtacacgactatcgcttgaccctgccacggatcctgatataaacataaactcaattaaagattataagataaactctaatccttatttttcattaatggttagagttaattccgatggtggcaaatacccagagttatctctggagaaactcctagaccgggaagaacagagatctcatagcttgatattgactgccttggacggaggggacccaccaagaagtgccaccgctcacatagaaatttctgtcaaggataccaatgataaccccccggttttcagcagagacgaatatagaattagtcttagtgaaaatctgccccctgggtcccctgtgttgcaagtgacagccactgaccaggatgagggggtcaatgctgagataaactactacttccgaagcactgcccagagcacaaaacatatgttctcattggatgagaaaacaggtatgattaagaataaccagtcatttgattttgaagatgtagaaaggtacaccatggaagtggaagcgaaggacggaggtggtctctctacccagtgtaaagtaatcatagaaatccttgatgaaaacgacaacagcccagaaataatcatcacttctctctctgatcagattttggagaattcacctccaggaatggttgttgccctcttcaaaacacgggatctggatttcggaggaaatggagaagtcaggtgtaatatagaaacagacattccattcaagatttattcttcttccaataactactacaaactggtgacagatggagccctggaccgagagcagacaccagaatacaatgtcaccatcgtagccactgacaggggcaagccgcctctttcttccagtagaagcatcaccttgtatgtcgctgacatcaacgacaacgccccagttttcgaccagacgtcctacgtggtccacgtggccgagaacaacccgccaggagcctccattgcgcaagtgagcgcctctgacccggatttggggctcaatggccacatctcctactctatagtggcgagtgacctagagcccctggcggtgtcgtcatacgtgtcagtgagcgcgcagagcggggtggtgttcgcgcagcgcgcctttgatcacgagcagctgcgcgccttcgcgctcacgctgcaggcccgcgaccacggctcgcccacgctcagcgccaacgtgagcctgcgcgtgttggtgggagaccgcaatgacaacgcaccgcgggtgctgtacccagctctgggtcctgacggctccgcgttcttcgatatggtacctcgctctgcagagcccggctacctagtgactaaggtggtagcggtggacgccgactcgggacacaacgcctggctgtcctaccacgtgctgcaggccagtgagcccggactcttcagcctggggctgcgcactggggaggtgcgcacggctcgagccttaggcgacagggacgcagcccgccagcgcctgctggtcgctgtgcgtgacggtggacagccgccactctctgccaccgccacgcttcatctggtcttcgcagacaacttgcaagagatactgccagacctcagcgaccgccctgtactctctgacccccaggctgaactgcagttttacctggtggtggccttggccttaatctcagtgctcttcctcctcgccgtgattctggccattgccttgcgcctgcgacgctctctcagccctgctacttgggactgcttccatcctggtctctgtgtcaagtctggacctgtagttccccccaactacagtgaggggactttgccttattcttataatctgtgcattgcacatacgggtacaaaagagtttaatttcctaaaatgcagtgtgcccctacattccaatgaagacatggtttgcagtgtttctcctggagccttaattccacctcatggtggggaggatttgacttcacatcctgagactctgacttcgcaagccccgcccaacacggactggcgtttctctcaggcccagagacccggcaccagcggctcccaaaatggcgatgacaccggcacctggcccaacaaccagtttgacacagagatgctgcaagccatgatcttggcgtccgccagtgaagctgctgatgggagctccaccctgggagggggtgccggcaccatgggattgagcgcccgctacggaccccagttcaccctgcagcacgtgcccgactaccgccagaatgtctacatcccaggcagcaatgccacactgaccaacgcagctggcaagcgggatggcaaggccccagcaggtggcaatggcaacaagaagaagtcgggcaagaaggagaagaagtaacatggaggccaggccaagagccacagggcggcctctccccaaccagcccagcttctccttacctgcacccaggcctcagagtttcagggctaacccccagaatactggtaggggccaaggccatgctccccttgggaaacagaaacaagtgcccagtcagcacctaccccttcccccccagggggttgaatatgcaaaagcagttccgctgggaacccccatccaatcaactgctgtacccatgggggtagtggggttactgtagacaccaagaaccatttgccacaccccgtttagttacagctgaactcctccatcttccaaatcaatcaggcccatccatcccatgcctccctcctccccaccccactccaacagttcctctttcccgagtaaggtggttggggtgttgaagtaccaagtaacctacaagcctcctagttctgaaaagttggaagggcatcatgacctcttggcctctcctttgattctcaatcttcccccaaagcatggtttggtgccagccccttcacctccttccagagcccaagatcaatgctcaagttttggaggacatgatcaccatccccatggtactgatgcttgctggatttagggagggcattttgctaccaagcctcttcccaacgccctggggaccagtcttctgttttgtttttcattgtttgacgtttccactgcatgccttgacttcccccacctcctcctcaaacaagagactccactgcatgttccaagacagtatggggtggtaagataaggaagggaagtgtgtggatgtggatggtgggggcatggacaaagcttgacacatcaagttatcaaggccttggaggaggctctgtatgtcctcaggggactgacaacatcctccagattccagccataaaccaataactaggctggacccttcccactacataatagggctcagcccaggcagccagctttgggctgagctaacaggaccaatggattaaactggcatttcagtccaaggaagctcgaagcaggtttaggaccaggtccccttgagaggtcagaggggcctctgtgggtgctgggtactccagaggtgccactggtggaagggtcagcggagccccagcaggaagggtgggccagccaggccattcttagtccctgggttggggaggcagggagctagggcagggaccaaatgaacagaaagtctcagcccaggatggggcttcttcaacagggcccctgccctcctgaagcctcagtccttcaccttgccaggtgccgtttctcttccgtgaaggccactgcccaggtccccagtgcgccccctagtggccatagcctggttaaagttccccagtgcctccttgtgcatagaccttcttctcccacccccttctgcccctgggtccccggccatccagcggggctgccagagaaccccagacctgcccttacagtagtgtagcgccccctccctctttcggctggtgtagaatagccagtagtgtagtgcggtgtgcttttacgtgatggcgggtgggcagcgggcggcgggctccgcgcagccgtctgtccttgatctgcccgcggcggcccgtgttgtgttttgtgctgtgtccacgcgctaaggcgaccccctcccccgtactgacttctcctataagcgcttctcttcgcatagtcacgtagctcccaccccaccctcttcctgtgtctcacgcaagttttatactctaatatttatatggctttttttcttcgacaaaaaaataataaaacgtttcttctgaaaagctg

SEQ ID NO: 42 - DNA, 2463 bp, Homo sapiens
  misc_feature: protocadherin gamma subfamily B, 6 (isoform 2)
atgggagggagctgcgcgcagaggcgccgggccggcccgcggcaggtgctatttcctttgctgctgcctttgttctaccccaccctgagtgagccgatccgctactcgattccggaggagctggccaagggctcggtggtggggaacctcgctaaggatctagggctcagtgtcctggatgtgtcggctcgcaagctgcgagtgagcgcggagaagctgcacttcagcgtagacgcggagagcggggacttacttgtgaagaaccgaatagaccgtgagcaaatatgcaaagagagaagaagatgtgagttgcaattggaagctgtggtggaaaatcctttaaatatttttcatgtcattgtggtgattgaggatgttaatgaccacgcccctcaatttgataaaaaggaaatacatttagaaattttcgaatctgcatccgctggtacacgactatcgcttgaccctgccacggatcctgatataaacataaactcaattaaagattataagataaactctaatccttatttttcattaatggttagagttaattccgatggtggcaaatacccagagttatctctggagaaactcctagaccgggaagaacagagatctcatagcttgatattgactgccttggacggaggggacccaccaagaagtgccaccgctcacatagaaatttctgtcaaggataccaatgataaccccccggttttcagcagagacgaatatagaattagtcttagtgaaaatctgccccctgggtcccctgtgttgcaagtgacagccactgaccaggatgagggggtcaatgctgagataaactactacttccgaagcactgcccagagcacaaaacatatgttctcattggatgagaaaacaggtatgattaagaataaccagtcatttgattttgaagatgtagaaaggtacaccatggaagtggaagcgaaggacggaggtggtctctctacccagtgtaaagtaatcatagaaatccttgatgaaaacgacaacagcccagaaataatcatcacttctctctctgatcagattttggagaattcacctccaggaatggttgttgccctcttcaaaacacgggatctggatttcggaggaaatggagaagtcaggtgtaatatagaaacagacattccattcaagatttattcttcttccaataactactacaaactggtgacagatggagccctggaccgagagcagacaccagaatacaatgtcaccatcgtagccactgacaggggcaagccgcctctttcttccagtagaagcatcaccttgtatgtcgctgacatcaacgacaacgccccagttttcgaccagacgtcctacgtggtccacgtggccgagaacaacccgccaggagcctccattgcgcaagtgagcgcctctgacccggatttggggctcaatggccacatctcctactctatagtggcgagtgacctagagcccctggcggtgtcgtcatacgtgtcagtgagcgcgcagagcggggtggtgttcgcgcagcgcgcctttgatcacgagcagctgcgcgccttcgcgctcacgctgcaggcccgcgaccacggctcgcccacgctcagcgccaacgtgagcctgcgcgtgttggtgggagaccgcaatgacaacgcaccgcgggtgctgtacccagctctgggtcctgacggctccgcgttcttcgatatggtacctcgctctgcagagcccggctacctagtgactaaggtggtagcggtggacgccgactcgggacacaacgcctggctgtcctaccacgtgctgcaggccagtgagcccggactcttcagcctggggctgcgcactggggaggtgcgcacggctcgagccttaggcgacagggacgcagcccgccagcgcctgctggtcgctgtgcgtgacggtggacagccgccactctctgccaccgccacgcttcatctggtcttcgcagacaacttgcaagagatactgccagacctcagcgaccgccctgtactctctgacccccaggctgaactgcagttttacctggtggtggccttggccttaatctcagtgctcttcctcctcgccgtgattctggccattgccttgcgcctgcgacgctctctcagccctgctacttgggactgcttccatcctggtctctgtgtcaagtctggacctgtagttccccccaactacagtgaggggactttgccttattcttataatctgtgcattgcacatacgggtacaaaagagtttaatttcctaaaatgcagtgtgcccctacattccaatgaagacatggtttgcagtgtttctcctggagccttaattccacctcatggtggggaggatttgacttcacatcctgagactctgacttcggtgagtttctcttttttgtgtgtgatttatctaatagtctactag

SEQ ID NO: 43 - DNA, 938 bp, Homo sapiens
  misc_feature: phospholipase A2 inhibitor and LY6/PLAUR domain containing (isoform 1)
aggagaggggaagagagagaaggagagggaatcccagttcttgcagccactgggaatcaagaggcccaactccgtcttggtcttcaagcaaacaaacaaacaacaatgggccgtgggaagggtgaatgtgggtccagacccacccctcctcagcttcctataaaagctggggaccaggtactgctgatacacacaccatgaggctctccaggagaccagagacctttctgctggcctttgtgttgctctgcaccctcctgggtcttgggtgcccactacactgcgaaatatgtacggcggcggggagcaggtgccatggccaaatgaagacctgcagcagtgacaaggacacatgtgtgctcctggtcgggaaggctacttcaaagggcaaggagttggtgcacacctacaagggctgcatcaggtcccaggactgctactccggcgttatatccaccaccatgggccccaaggaccacatggtaaccagctccttctgctgccagagcgacggctgcaacagtgcctttttgtctgttcccttgaccaatcttactgagaatggcctgatgtgccccgcctgcactgcgagcttcagggacaaatgcatggggcccatgacccactgtactggaaaggaaaaccactgcgtctccttatctggacacgtgcaggctggtattttcaaacccagatttgctatgcggggctgtgctacagagagtatgtgctttaccaagcctggtgctgaagtacccacaggcaccaatgtcctcttcctccatcatatagagtgcactcactccccctgaaaagctatctgaacagaggaagataatgtagtgtgaagtccccatttgtcctcagcctgtaactccccgtgtgcctataaagaagttaatagagcaagcctgaaaaaaaaaaaaaaaaaaaaaaaa

SEQ ID NO: 44 - DNA, 598 bp, Homo sapiens
  misc_feature: phospholipase A2 inhibitor and LY6/PLAUR domain containing (isoform 2)
atttcacgaaggcatgggggtggccataggcggcctgaaatagaagggcaaggagttggtgcacacctacaagggctgcatcaggtcccaggactgctactccggcgttatatccaccaccatgggccccaaggaccacatggtaaccagctccttctgctgccagagcgacggctgcaacagtgcctttttgtctgttcccttgaccaatcttactgagaatggcctgatgtgccccgcctgcactgcgagcttcagggacaaatgcatggggcccatgacccactgtactggaaaggaaaaccactgcgtctccttatctggacacgtgcaggctggtattttcaaacccagatttgctatgcggggctgtgctacagagagtatgtgctttaccaagcctggtgctgaagtacccacaggcaccaatgtcctcttcctccatcatatagagtgcactcactccccctgaaaagctatctgaacagaggaagataatgtagtgtgaagtccccatttgtcctcagcctgtaactccccgtgtgcctataaagaagttaatagagcaagcctgaaaaaaaaaaaaaaaaaaaaaaaa

SEQ ID NO: 45 - DNA, 7957 bp, Homo sapiens
  misc_feature: Protein patched homolog 1 (Isoform L)
gcgcccgccgtgtgagcagcagcagcggctggtctgtcaaccggagcccgagcccgagcagcctgcggccagcagcgtcctcgcaagccgagcgcccaggcgcgccaggagcccgcagcagcggcagcagcgcgccgggccgcccgggaagcctccgtccccgcggcggcggcggcggcggcggcaacatggcctcggctggtaacgccgccgagccccaggaccgcggcggcggcggcagcggctgtatcggtgccccgggacggccggctggaggcgggaggcgcagacggacgggggggctgcgccgtgctgccgcgccggaccgggactatctgcaccggcccagctactgcgacgccgccttcgctctggagcagatttccaaggggaaggctactggccggaaagcgccgctgtggctgagagcgaagtttcagagactcttatttaaactgggttgttacattcaaaaaaactgcggcaagttcttggttgtgggcctcctcatatttggggccttcgcggtgggattaaaagcagcgaacctcgagaccaacgtggaggagctgtgggtggaagttggaggacgagtaagtcgtgaattaaattatactcgccagaagattggagaagaggctatgtttaatcctcaactcatgatacagacccctaaagaagaaggtgctaatgtcctgaccacagaagcgctcctacaacacctggactcggcactccaggccagccgtgtccatgtatacatgtacaacaggcagtggaaattggaacatttgtgttacaaatcaggagagcttatcacagaaacaggttacatggatcagataatagaatatctttacccttgtttgattattacacctttggactgcttctgggaaggggcgaaattacagtctgggacagcatacctcctaggtaaacctcctttgcggtggacaaacttcgaccctttggaattcctggaagagttaaagaaaataaactatcaagtggacagctgggaggaaatgctgaataaggctgaggttggtcatggttacatggaccgcccctgcctcaatccggccgatccagactgccccgccacagcccccaacaaaaattcaaccaaacctcttgatatggcccttgttttgaatggtggatgtcatggcttatccagaaagtatatgcactggcaggaggagttgattgtgggtggcacagtcaagaacagcactggaaaactcgtcagcgcccatgccctgcagaccatgttccagttaatgactcccaagcaaatgtacgagcacttcaaggggtacgagtatgtctcacacatcaactggaacgaggacaaagcggcagccatcctggaggcctggcagaggacatatgtggaggtggttcatcagagtgtcgcacagaactccactcaaaaggtgctttccttcaccaccacgaccctggacgacatcctgaaatccttctctgacgtcagtgtcatccgcgtggccagcggctacttactcatgctcgcctatgcctgtctaaccatgctgcgctgggactgctccaagtcccagggtgccgtggggctggctggcgtcctgctggttgcactgtcagtggctgcaggactgggcctgtgctcattgatcggaatttcctttaacgctgcaacaactcaggttttgccatttctcgctcttggtgttggtgtggatgatgtttttcttctggcccacgccttcagtgaaacaggacagaataaaagaatcccttttgaggacaggaccggggagtgcctgaagcgcacaggagccagcgtggccctcacgtccatcagcaatgtcacagccttcttcatggccgcgttaatcccaattcccgctctgcgggcgttctccctccaggcagcggtagtagtggtgttcaattttgccatggttctgctcatttttcctgcaattctcagcatggatttatatcgacgcgaggacaggagactggatattttctgctgttttacaagcccctgcgtcagcagagtgattcaggttgaacctcaggcctacaccgacacacacgacaatacccgctacagccccccacctccctacagcagccacagctttgcccatgaaacgcagattaccatgcagtccactgtccagctccgcacggagtacgacccccacacgcacgtgtactacaccaccgctgagccgcgctccgagatctctgtgcagcccgtcaccgtgacacaggacaccctcagctgccagagcccagagagcaccagctccacaagggacctgctctcccagttctccgactccagcctccactgcctcgagcccccctgtacgaagtggacactctcatcttttgctgagaagcactatgctcctttcctcttgaaaccaaaagccaaggtagtggtgatcttcctttttctgggcttgctgggggtcagcctttatggcaccacccgagtgagagacgggctggaccttacggacattgtacctcgggaaaccagagaatatgactttattgctgcacaattcaaatacttttctttctacaacatgtatatagtcacccagaaagcagactacccgaatatccagcacttactttacgacctacacaggagtttcagtaacgtgaagtatgtcatgttggaagaaaacaaacagcttcccaaaatgtggctgcactacttcagagactggcttcagggacttcaggatgcatttgacagtgactgggaaaccgggaaaatcatgccaaacaattacaagaatggatcagacgatggagtccttgcctacaaactcctggtgcaaaccggcagccgcgataagcccatcgacatcagccagttgactaaacagcgtctggtggatgcagatggcatcattaatcccagcgctttctacatctacctgacggcttgggtcagcaacgaccccgtcgcgtatgctgcctcccaggccaacatccggccacaccgaccagaatgggtccacgacaaagccgactacatgcctgaaacaaggctgagaatcccggcagcagagcccatcgagtatgcccagttccctttctacctcaacggcttgcgggacacctcagactttgtggaggcaattgaaaaagtaaggaccatctgcagcaactatacgagcctggggctgtccagttaccccaacggctaccccttcctcttctgggagcagtacatcggcctccgccactggctgctgctgttcatcagcgtggtgttggcctgcacattcctcgtgtgcgctgtcttccttctgaacccctggacggccgggatcattgtgatggtcctggcgctgatgacggtcgagctgttcggcatgatgggcctcatcggaatcaagctcagtgccgtgcccgtggtcatcctgatcgcttctgttggcataggagtggagttcaccgttcacgttgctttggcctttctgacggccatcggcgacaagaaccgcagggctgtgcttgccctggagcacatgtttgcacccgtcctggatggcgccgtgtccactctgctgggagtgctgatgctggcgggatctgagttcgacttcattgtcaggtatttctttgctgtgctggcgatcctcaccatcctcggcgttctcaatgggctggttttgcttcccgtgcttttgtctttctttggaccatatcctgaggtgtctccagccaacggcttgaaccgcctgcccacaccctcccctgagccaccccccagcgtggtccgcttcgccatgccgcccggccacacgcacagcgggtctgattcctccgactcggagtatagttcccagacgacagtgtcaggcctcagcgaggagcttcggcactacgaggcccagcagggcgcgggaggccctgcccaccaagtgatcgtggaagccacagaaaaccccgtcttcgcccactccactgtggtccatcccgaatccaggcatcacccaccctcgaacccgagacagcagccccacctggactcagggtccctgcctcccggacggcaaggccagcagccccgcagggacccccccagagaaggcttgtggccacccccctacagaccgcgcagagacgcttttgaaatttctactgaagggcattctggccctagcaatagggcccgctggggccctcgcggggcccgttctcacaaccctcggaacccagcgtccactgccatgggcagctccgtgcccggctactgccagcccatcaccactgtgacggcttctgcctccgtgactgtcgccgtgcacccgccgcctgtccctgggcctgggcggaacccccgagggggactctgcccaggctaccctgagactgaccacggcctgtttgaggacccccacgtgcctttccacgtccggtgtgagaggagggattcgaaggtggaagtcattgagctgcaggacgtggaatgcgaggagaggccccggggaagcagctccaactgagggtgattaaaatctgaagcaaagaggccaaagattggaaaccccccacccccacctctttccagaactgcttgaagagaactggttggagttatggaaaagatgccctgtgccaggacagcagttcattgttactgtaaccgattgtattattttgttaaatatttctataaatatttaagagatgtacacatgtgtaatataggaaggaaggatgtaaagtggtatgatctggggcttctccactcctgccccagagtgtggaggccacagtggggcctctccgtatttgtgcattgggctccgtgccacaaccaagcttcattagtcttaaatttcagcatatgttgctgctgcttaaatattgtataatttacttgtataattctatgcaaatattgcttatgtaataggattattttgtaaaggtttctgtttaaaatattttaaatttgcatatcacaaccctgtggtagtatgaaatgttactgttaactttcaaacacgctatgcgtgataatttttttgtttaatgagcagatatgaagaaagcacgttaatcctggtggcttctctaggtgtcgttgtgtgcggtcctcttgtttggctgtgcgtgtgaacacgtgtgtgagttcaccatgtactgtactgtgattttttttttgtcttgttttgtttctctacactgtctgtaacctgtagtaggctctgacctagtcaggctggaagcgtcaggatatcttttcttcgtgctggtgagggctggccctaaacatccacctaatcctttcaaatcagcccggcaaaagctagactctcctcgtgtctacggcatctcttatgatcattggctgccatccaggaccccaatttgtgcttcagggggataatctccttctctcggatcattgtgatggatgctggaacctcagggtatggagctcacatcagttcatcatggtgggtgttagagaattcggtgacatgcctagtgctgagccttggctgggccatgagagtctgtatactctaaaaagcatgcagcatggtgcccctcttctgaccaacacacacacgacccctcccccaacacccccaaattcaagagtggatgtggccctgtcacaggtagaaaaacctatttagttaattctttcttggcccacagtctcccagaaatgatgttttgagtccctatagtttaaactccctctcttaaatggagcagctggttgaggctttctagatctgtttgcatcttctttaaaactaagtggtgagcatgcattgtggtgtagaggcaggcattatgtaggataagagctccggggggattcttcatgcaccagtgtttagggtacgtgcttcctaagtaaatccaaacattgtctccatcctccccgtcattagtgctctttcaatgtgatgtgggaaagcaggaggatggacacaccccactgaaagatgtaggcaggggcaggtctctcaaccaggcatatttttaaaagttgcttctgtactggttctcttcttttgctctgaggtgtgggctccctcatctcgtaaccagagaccagcacatgtcagggaagcacccagtgtcggctccccatccaaatccacaccagcaccttgttacagacaagaagtcagaggaaagggcggggtccctgcagggctgaagcctaagctactgtgaggcgctcacgagtggcagctcctgttactcccttttaaattacctgggaaatcttaacagaaaggtaatgggcccccagaaatacccacagcatagtgacctcagaccctgatactcaccacaaaacttttaagatgctgattgggagccgcttgtggctgctgggtgtgtgtgtgtgtgtgtgcgtgcgtgcgtgtgtgtgtgtctctgctggggaccctggccacccccctgctgctgtcttggtgcctgtcacccacatggtctgccatcctaacacccagctctgctcagaaaacgtcctgcgtggaggagggatgatgcagaattctgaagtcgacttccctctggctcctggcgtgccctcgctcccttcctgagcccagctcgtgttgcgccggaggctgcgcggcccctgatttctgcatggtgtagaactttctccaatagtcacattggcaaagggagaactggggtgggcggggggtggggctggcagggaattagaatttctctctctcttttaatagttttattttgtctgtcctgtttgttcatttggatgttttaatttttaaaaaaaaaaaaactttgctgatatttataattttgtatcataagaatgttttcctctacagtatttgtcatgccagtttataacaaaaaaaaatgcagggattttatttctattggaaacattacagctatgttttacttttggacagaatttttatttgtatagagtgcttactaatgttaaatagttcagagtatataacatttacattaaggactcatggtaggttttagggtaaggagtttaaaggaaataaatattcaaactgggtctcattgccaattttggtggaaatgagtttgtgtcatttcaattacaaagataaaagtatgccatataatttatttatatgaagatttatttttgtagtgtacatagtagtcatcaagtcttttgacagaagtatatttttaaagaatttatatgtgatgaatccataatgtctggaactttgctgagacatgagtgggcacagttttcattgtaaattacagcaaggaaagaaaatgtttaacagtgttaagagagtcagagcagagtggatattcatgcgattatgaagtgtttattagttaccattggcgacctagcatgcttctcatttcaaaccttggaaggtgaaaatgtacaaactctctaaataattaatgttcaaacactgatagaaattctaacatgaataaaaaataatataacttgttggttatatctttgtttgtagaatgctttttttctttaaaatacttgggagagacagttagtgttggagccatcagaaactgttgtttcatcttgctgaccttgtgacactcttcttttttgctctatctgatggagagagttttaggttttcctcctttttgttttgtataaatagtgggtataagcatagctctgttacatggatgtattacaaagtgggggctgagcttttagtgtgatcatcacccaaatagtgtacattgtacccattaattaatttcttatcacctgaccctatttttgttttctcataccaagaaacttcctaagttaaccatcaaaattagtccttctgtcatctctcttagcatacttatttcccttatgtgatgcctaataatgagggaacataaataaagccaaattcaaagataaaaaaaaaaaaaa

SEQ ID NO: 46 - DNA, 8065 bp, Homo sapiens
  misc_feature: Protein patched homolog 1 (Isoform M)
acccaggagggctgtgctgatagcacgttcctcgagtttactttgctttccttgagtttattgtaaaggggtaaagttttcggatccgtcacgtgaccctgacaggtcctgcctatggcgcggcagaccacccacgccgagggccatggaactgcttaatagaaacaggcttgtaattgtgagtccgcgctgcactccgccgaaagcctccggcggcccagcgcgccggggtttttacactttccgttccttttgtaaagacggaggaggaggagaagaagaagaagaaaacggaggagaagaaaaagacgacaggggagacaaagagacccgcagcgacaaggcaagggggagacgagggaagactgggagaagacggaggagcggaggacgaggaaaggggggccagggaaaaaaaaggaattgatgtgaaatccaagcccagcgtccgcgccatcggcacccgcgctccgagcaggggttgacggccggctatggggaaggctactggccggaaagcgccgctgtggctgagagcgaagtttcagagactcttatttaaactgggttgttacattcaaaaaaactgcggcaagttcttggttgtgggcctcctcatatttggggccttcgcggtgggattaaaagcagcgaacctcgagaccaacgtggaggagctgtgggtggaagttggaggacgagtaagtcgtgaattaaattatactcgccagaagattggagaagaggctatgtttaatcctcaactcatgatacagacccctaaagaagaaggtgctaatgtcctgaccacagaagcgctcctacaacacctggactcggcactccaggccagccgtgtccatgtatacatgtacaacaggcagtggaaattggaacatttgtgttacaaatcaggagagcttatcacagaaacaggttacatggatcagataatagaatatctttacccttgtttgattattacacctttggactgcttctgggaaggggcgaaattacagtctgggacagcatacctcctaggtaaacctcctttgcggtggacaaacttcgaccctttggaattcctggaagagttaaagaaaataaactatcaagtggacagctgggaggaaatgctgaataaggctgaggttggtcatggttacatggaccgcccctgcctcaatccggccgatccagactgccccgccacagcccccaacaaaaattcaaccaaacctcttgatatggcccttgttttgaatggtggatgtcatggcttatccagaaagtatatgcactggcaggaggagttgattgtgggtggcacagtcaagaacagcactggaaaactcgtcagcgcccatgccctgcagaccatgttccagttaatgactcccaagcaaatgtacgagcacttcaaggggtacgagtatgtctcacacatcaactggaacgaggacaaagcggcagccatcctggaggcctggcagaggacatatgtggaggtggttcatcagagtgtcgcacagaactccactcaaaaggtgctttccttcaccaccacgaccctggacgacatcctgaaatccttctctgacgtcagtgtcatccgcgtggccagcggctacttactcatgctcgcctatgcctgtctaaccatgctgcgctgggactgctccaagtcccagggtgccgtggggctggctggcgtcctgctggttgcactgtcagtggctgcaggactgggcctgtgctcattgatcggaatttcctttaacgctgcaacaactcaggttttgccatttctcgctcttggtgttggtgtggatgatgtttttcttctggcccacgccttcagtgaaacaggacagaataaaagaatcccttttgaggacaggaccggggagtgcctgaagcgcacaggagccagcgtggccctcacgtccatcagcaatgtcacagccttcttcatggccgcgttaatcccaattcccgctctgcgggcgttctccctccaggcagcggtagtagtggtgttcaattttgccatggttctgctcatttttcctgcaattctcagcatggatttatatcgacgcgaggacaggagactggatattttctgctgttttacaagcccctgcgtcagcagagtgattcaggttgaacctcaggcctacaccgacacacacgacaatacccgctacagccccccacctccctacagcagccacagctttgcccatgaaacgcagattaccatgcagtccactgtccagctccgcacggagtacgacccccacacgcacgtgtactacaccaccgctgagccgcgctccgagatctctgtgcagcccgtcaccgtgacacaggacaccctcagctgccagagcccagagagcaccagctccacaagggacctgctctcccagttctccgactccagcctccactgcctcgagcccccctgtacgaagtggacactctcatcttttgctgagaagcactatgctcctttcctcttgaaaccaaaagccaaggtagtggtgatcttcctttttctgggcttgctgggggtcagcctttatggcaccacccgagtgagagacgggctggaccttacggacattgtacctcgggaaaccagagaatatgactttattgctgcacaattcaaatacttttctttctacaacatgtatatagtcacccagaaagcagactacccgaatatccagcacttactttacgacctacacaggagtttcagtaacgtgaagtatgtcatgttggaagaaaacaaacagcttcccaaaatgtggctgcactacttcagagactggcttcagggacttcaggatgcatttgacagtgactgggaaaccgggaaaatcatgccaaacaattacaagaatggatcagacgatggagtccttgcctacaaactcctggtgcaaaccggcagccgcgataagcccatcgacatcagccagttgactaaacagcgtctggtggatgcagatggcatcattaatcccagcgctttctacatctacctgacggcttgggtcagcaacgaccccgtcgcgtatgctgcctcccaggccaacatccggccacaccgaccagaatgggtccacgacaaagccgactacatgcctgaaacaaggctgagaatcccggcagcagagcccatcgagtatgcccagttccctttctacctcaacggcttgcgggacacctcagactttgtggaggcaattgaaaaagtaaggaccatctgcagcaactatacgagcctggggctgtccagttaccccaacggctaccccttcctcttctgggagcagtacatcggcctccgccactggctgctgctgttcatcagcgtggtgttggcctgcacattcctcgtgtgcgctgtcttccttctgaacccctggacggccgggatcattgtgatggtcctggcgctgatgacggtcgagctgttcggcatgatgggcctcatcggaatcaagctcagtgccgtgcccgtggtcatcctgatcgcttctgttggcataggagtggagttcaccgttcacgttgctttggcctttctgacggccatcggcgacaagaaccgcagggctgtgcttgccctggagcacatgtttgcacccgtcctggatggcgccgtgtccactctgctgggagtgctgatgctggcgggatctgagttcgacttcattgtcaggtatttctttgctgtgctggcgatcctcaccatcctcggcgttctcaatgggctggttttgcttcccgtgcttttgtctttctttggaccatatcctgaggtgtctccagccaacggcttgaaccgcctgcccacaccctcccctgagccaccccccagcgtggtccgcttcgccatgccgcccggccacacgcacagcgggtctgattcctccgactcggagtatagttcccagacgacagtgtcaggcctcagcgaggagcttcggcactacgaggcccagcagggcgcgggaggccctgcccaccaagtgatcgtggaagccacagaaaaccccgtcttcgcccactccactgtggtccatcccgaatccaggcatcacccaccctcgaacccgagacagcagccccacctggactcagggtccctgcctcccggacggcaaggccagcagccccgcagggacccccccagagaaggcttgtggccacccccctacagaccgcgcagagacgcttttgaaatttctactgaagggcattctggccctagcaatagggcccgctggggccctcgcggggcccgttctcacaaccctcggaacccagcgtccactgccatgggcagctccgtgcccggctactgccagcccatcaccactgtgacggcttctgcctccgtgactgtcgccgtgcacccgccgcctgtccctgggcctgggcggaacccccgagggggactctgcccaggctaccctgagactgaccacggcctgtttgaggacccccacgtgcctttccacgtccggtgtgagaggagggattcgaaggtggaagtcattgagctgcaggacgtggaatgcgaggagaggccccggggaagcagctccaactgagggtgattaaaatctgaagcaaagaggccaaagattggaaaccccccacccccacctctttccagaactgcttgaagagaactggttggagttatggaaaagatgccctgtgccaggacagcagttcattgttactgtaaccgattgtattattttgttaaatatttctataaatatttaagagatgtacacatgtgtaatataggaaggaaggatgtaaagtggtatgatctggggcttctccactcctgccccagagtgtggaggccacagtggggcctctccgtatttgtgcattgggctccgtgccacaaccaagcttcattagtcttaaatttcagcatatgttgctgctgcttaaatattgtataatttacttgtataattctatgcaaatattgcttatgtaataggattattttgtaaaggtttctgtttaaaatattttaaatttgcatatcacaaccctgtggtagtatgaaatgttactgttaactttcaaacacgctatgcgtgataatttttttgtttaatgagcagatatgaagaaagcacgttaatcctggtggcttctctaggtgtcgttgtgtgcggtcctcttgtttggctgtgcgtgtgaacacgtgtgtgagttcaccatgtactgtactgtgattttttttttgtcttgttttgtttctctacactgtctgtaacctgtagtaggctctgacctagtcaggctggaagcgtcaggatatcttttcttcgtgctggtgagggctggccctaaacatccacctaatcctttcaaatcagcccggcaaaagctagactctcctcgtgtctacggcatctcttatgatcattggctgccatccaggaccccaatttgtgcttcagggggataatctccttctctcggatcattgtgatggatgctggaacctcagggtatggagctcacatcagttcatcatggtgggtgttagagaattcggtgacatgcctagtgctgagccttggctgggccatgagagtctgtatactctaaaaagcatgcagcatggtgcccctcttctgaccaacacacacacgacccctcccccaacacccccaaattcaagagtggatgtggccctgtcacaggtagaaaaacctatttagttaattctttcttggcccacagtctcccagaaatgatgttttgagtccctatagtttaaactccctctcttaaatggagcagctggttgaggctttctagatctgtttgcatcttctttaaaactaagtggtgagcatgcattgtggtgtagaggcaggcattatgtaggataagagctccggggggattcttcatgcaccagtgtttagggtacgtgcttcctaagtaaatccaaacattgtctccatcctccccgtcattagtgctctttcaatgtgatgtgggaaagcaggaggatggacacaccccactgaaagatgtaggcaggggcaggtctctcaaccaggcatatttttaaaagttgcttctgtactggttctcttcttttgctctgaggtgtgggctccctcatctcgtaaccagagaccagcacatgtcagggaagcacccagtgtcggctccccatccaaatccacaccagcaccttgttacagacaagaagtcagaggaaagggcggggtccctgcagggctgaagcctaagctactgtgaggcgctcacgagtggcagctcctgttactcccttttaaattacctgggaaatcttaacagaaaggtaatgggcccccagaaatacccacagcatagtgacctcagaccctgatactcaccacaaaacttttaagatgctgattgggagccgcttgtggctgctgggtgtgtgtgtgtgtgtgtgcgtgcgtgcgtgtgtgtgtgtctctgctggggaccctggccacccccctgctgctgtcttggtgcctgtcacccacatggtctgccatcctaacacccagctctgctcagaaaacgtcctgcgtggaggagggatgatgcagaattctgaagtcgacttccctctggctcctggcgtgccctcgctcccttcctgagcccagctcgtgttgcgccggaggctgcgcggcccctgatttctgcatggtgtagaactttctccaatagtcacattggcaaagggagaactggggtgggcggggggtggggctggcagggaattagaatttctctctctcttttaatagttttattttgtctgtcctgtttgttcatttggatgttttaatttttaaaaaaaaaaaaactttgctgatatttataattttgtatcataagaatgttttcctctacagtatttgtcatgccagtttataacaaaaaaaaatgcagggattttatttctattggaaacattacagctatgttttacttttggacagaatttttatttgtatagagtgcttactaatgttaaatagttcagagtatataacatttacattaaggactcatggtaggttttagggtaaggagtttaaaggaaataaatattcaaactgggtctcattgccaattttggtggaaatgagtttgtgtcatttcaattacaaagataaaagtatgccatataatttatttatatgaagatttatttttgtagtgtacatagtagtcatcaagtcttttgacagaagtatatttttaaagaatttatatgtgatgaatccataatgtctggaactttgctgagacatgagtgggcacagttttcattgtaaattacagcaaggaaagaaaatgtttaacagtgttaagagagtcagagcagagtggatattcatgcgattatgaagtgtttattagttaccattggcgacctagcatgcttctcatttcaaaccttggaaggtgaaaatgtacaaactctctaaataattaatgttcaaacactgatagaaattctaacatgaataaaaaataatataacttgttggttatatctttgtttgtagaatgctttttttctttaaaatacttgggagagacagttagtgttggagccatcagaaactgttgtttcatcttgctgaccttgtgacactcttcttttttgctctatctgatggagagagttttaggttttcctcctttttgttttgtataaatagtgggtataagcatagctctgttacatggatgtattacaaagtgggggctgagcttttagtgtgatcatcacccaaatagtgtacattgtacccattaattaatttcttatcacctgaccctatttttgttttctcataccaagaaacttcctaagttaaccatcaaaattagtccttctgtcatctctcttagcatacttatttcccttatgtgatgcctaataatgagggaacataaataaagccaaattcaaagataaaaaaaaaaaaaa

SEQ ID NO: 47 - DNA, 7757 bp, Homo sapiens
  misc_feature: Protein patched homolog 1 (Isoform S)
gaaggcgagcacccagacgggggcccgccggggccgcggccagcgccggggaaatgccgcgccggggagcagcctgcgccggcctgagcccttccctttgcactcggctgttttttacgtttaaccagaaaggaagggagaggagggaaagatccatgtggctgccctcttccgatcacaaatattgtcgggaaggctactggccggaaagcgccgctgtggctgagagcgaagtttcagagactcttatttaaactgggttgttacattcaaaaaaactgcggcaagttcttggttgtgggcctcctcatatttggggccttcgcggtgggattaaaagcagcgaacctcgagaccaacgtggaggagctgtgggtggaagttggaggacgagtaagtcgtgaattaaattatactcgccagaagattggagaagaggctatgtttaatcctcaactcatgatacagacccctaaagaagaaggtgctaatgtcctgaccacagaagcgctcctacaacacctggactcggcactccaggccagccgtgtccatgtatacatgtacaacaggcagtggaaattggaacatttgtgttacaaatcaggagagcttatcacagaaacaggttacatggatcagataatagaatatctttacccttgtttgattattacacctttggactgcttctgggaaggggcgaaattacagtctgggacagcatacctcctaggtaaacctcctttgcggtggacaaacttcgaccctttggaattcctggaagagttaaagaaaataaactatcaagtggacagctgggaggaaatgctgaataaggctgaggttggtcatggttacatggaccgcccctgcctcaatccggccgatccagactgccccgccacagcccccaacaaaaattcaaccaaacctcttgatatggcccttgttttgaatggtggatgtcatggcttatccagaaagtatatgcactggcaggaggagttgattgtgggtggcacagtcaagaacagcactggaaaactcgtcagcgcccatgccctgcagaccatgttccagttaatgactcccaagcaaatgtacgagcacttcaaggggtacgagtatgtctcacacatcaactggaacgaggacaaagcggcagccatcctggaggcctggcagaggacatatgtggaggtggttcatcagagtgtcgcacagaactccactcaaaaggtgctttccttcaccaccacgaccctggacgacatcctgaaatccttctctgacgtcagtgtcatccgcgtggccagcggctacttactcatgctcgcctatgcctgtctaaccatgctgcgctgggactgctccaagtcccagggtgccgtggggctggctggcgtcctgctggttgcactgtcagtggctgcaggactgggcctgtgctcattgatcggaatttcctttaacgctgcaacaactcaggttttgccatttctcgctcttggtgttggtgtggatgatgtttttcttctggcccacgccttcagtgaaacaggacagaataaaagaatcccttttgaggacaggaccggggagtgcctgaagcgcacaggagccagcgtggccctcacgtccatcagcaatgtcacagccttcttcatggccgcgttaatcccaattcccgctctgcgggcgttctccctccaggcagcggtagtagtggtgttcaattttgccatggttctgctcatttttcctgcaattctcagcatggatttatatcgacgcgaggacaggagactggatattttctgctgttttacaagcccctgcgtcagcagagtgattcaggttgaacctcaggcctacaccgacacacacgacaatacccgctacagccccccacctccctacagcagccacagctttgcccatgaaacgcagattaccatgcagtccactgtccagctccgcacggagtacgacccccacacgcacgtgtactacaccaccgctgagccgcgctccgagatctctgtgcagcccgtcaccgtgacacaggacaccctcagctgccagagcccagagagcaccagctccacaagggacctgctctcccagttctccgactccagcctccactgcctcgagcccccctgtacgaagtggacactctcatcttttgctgagaagcactatgctcctttcctcttgaaaccaaaagccaaggtagtggtgatcttcctttttctgggcttgctgggggtcagcctttatggcaccacccgagtgagagacgggctggaccttacggacattgtacctcgggaaaccagagaatatgactttattgctgcacaattcaaatacttttctttctacaacatgtatatagtcacccagaaagcagactacccgaatatccagcacttactttacgacctacacaggagtttcagtaacgtgaagtatgtcatgttggaagaaaacaaacagcttcccaaaatgtggctgcactacttcagagactggcttcagggacttcaggatgcatttgacagtgactgggaaaccgggaaaatcatgccaaacaattacaagaatggatcagacgatggagtccttgcctacaaactcctggtgcaaaccggcagccgcgataagcccatcgacatcagccagttgactaaacagcgtctggtggatgcagatggcatcattaatcccagcgctttctacatctacctgacggcttgggtcagcaacgaccccgtcgcgtatgctgcctcccaggccaacatccggccacaccgaccagaatgggtccacgacaaagccgactacatgcctgaaacaaggctgagaatcccggcagcagagcccatcgagtatgcccagttccctttctacctcaacggcttgcgggacacctcagactttgtggaggcaattgaaaaagtaaggaccatctgcagcaactatacgagcctggggctgtccagttaccccaacggctaccccttcctcttctgggagcagtacatcggcctccgccactggctgctgctgttcatcagcgtggtgttggcctgcacattcctcgtgtgcgctgtcttccttctgaacccctggacggccgggatcattgtgatggtcctggcgctgatgacggtcgagctgttcggcatgatgggcctcatcggaatcaagctcagtgccgtgcccgtggtcatcctgatcgcttctgttggcataggagtggagttcaccgttcacgttgctttggcctttctgacggccatcggcgacaagaaccgcagggctgtgcttgccctggagcacatgtttgcacccgtcctggatggcgccgtgtccactctgctgggagtgctgatgctggcgggatctgagttcgacttcattgtcaggtatttctttgctgtgctggcgatcctcaccatcctcggcgttctcaatgggctggttttgcttcccgtgcttttgtctttctttggaccatatcctgaggtgtctccagccaacggcttgaaccgcctgcccacaccctcccctgagccaccccccagcgtggtccgcttcgccatgccgcccggccacacgcacagcgggtctgattcctccgactcggagtatagttcccagacgacagtgtcaggcctcagcgaggagcttcggcactacgaggcccagcagggcgcgggaggccctgcccaccaagtgatcgtggaagccacagaaaaccccgtcttcgcccactccactgtggtccatcccgaatccaggcatcacccaccctcgaacccgagacagcagccccacctggactcagggtccctgcctcccggacggcaaggccagcagccccgcagggacccccccagagaaggcttgtggccacccccctacagaccgcgcagagacgcttttgaaatttctactgaagggcattctggccctagcaatagggcccgctggggccctcgcggggcccgttctcacaaccctcggaacccagcgtccactgccatgggcagctccgtgcccggctactgccagcccatcaccactgtgacggcttctgcctccgtgactgtcgccgtgcacccgccgcctgtccctgggcctgggcggaacccccgagggggactctgcccaggctaccctgagactgaccacggcctgtttgaggacccccacgtgcctttccacgtccggtgtgagaggagggattcgaaggtggaagtcattgagctgcaggacgtggaatgcgaggagaggccccggggaagcagctccaactgagggtgattaaaatctgaagcaaagaggccaaagattggaaaccccccacccccacctctttccagaactgcttgaagagaactggttggagttatggaaaagatgccctgtgccaggacagcagttcattgttactgtaaccgattgtattattttgttaaatatttctataaatatttaagagatgtacacatgtgtaatataggaaggaaggatgtaaagtggtatgatctggggcttctccactcctgccccagagtgtggaggccacagtggggcctctccgtatttgtgcattgggctccgtgccacaaccaagcttcattagtcttaaatttcagcatatgttgctgctgcttaaatattgtataatttacttgtataattctatgcaaatattgcttatgtaataggattattttgtaaaggtttctgtttaaaatattttaaatttgcatatcacaaccctgtggtagtatgaaatgttactgttaactttcaaacacgctatgcgtgataatttttttgtttaatgagcagatatgaagaaagcacgttaatcctggtggcttctctaggtgtcgttgtgtgcggtcctcttgtttggctgtgcgtgtgaacacgtgtgtgagttcaccatgtactgtactgtgattttttttttgtcttgttttgtttctctacactgtctgtaacctgtagtaggctctgacctagtcaggctggaagcgtcaggatatcttttcttcgtgctggtgagggctggccctaaacatccacctaatcctttcaaatcagcccggcaaaagctagactctcctcgtgtctacggcatctcttatgatcattggctgccatccaggaccccaatttgtgcttcagggggataatctccttctctcggatcattgtgatggatgctggaacctcagggtatggagctcacatcagttcatcatggtgggtgttagagaattcggtgacatgcctagtgctgagccttggctgggccatgagagtctgtatactctaaaaagcatgcagcatggtgcccctcttctgaccaacacacacacgacccctcccccaacacccccaaattcaagagtggatgtggccctgtcacaggtagaaaaacctatttagttaattctttcttggcccacagtctcccagaaatgatgttttgagtccctatagtttaaactccctctcttaaatggagcagctggttgaggctttctagatctgtttgcatcttctttaaaactaagtggtgagcatgcattgtggtgtagaggcaggcattatgtaggataagagctccggggggattcttcatgcaccagtgtttagggtacgtgcttcctaagtaaatccaaacattgtctccatcctccccgtcattagtgctctttcaatgtgatgtgggaaagcaggaggatggacacaccccactgaaagatgtaggcaggggcaggtctctcaaccaggcatatttttaaaagttgcttctgtactggttctcttcttttgctctgaggtgtgggctccctcatctcgtaaccagagaccagcacatgtcagggaagcacccagtgtcggctccccatccaaatccacaccagcaccttgttacagacaagaagtcagaggaaagggcggggtccctgcagggctgaagcctaagctactgtgaggcgctcacgagtggcagctcctgttactcccttttaaattacctgggaaatcttaacagaaaggtaatgggcccccagaaatacccacagcatagtgacctcagaccctgatactcaccacaaaacttttaagatgctgattgggagccgcttgtggctgctgggtgtgtgtgtgtgtgtgtgcgtgcgtgcgtgtgtgtgtgtctctgctggggaccctggccacccccctgctgctgtcttggtgcctgtcacccacatggtctgccatcctaacacccagctctgctcagaaaacgtcctgcgtggaggagggatgatgcagaattctgaagtcgacttccctctggctcctggcgtgccctcgctcccttcctgagcccagctcgtgttgcgccggaggctgcgcggcccctgatttctgcatggtgtagaactttctccaatagtcacattggcaaagggagaactggggtgggcggggggtggggctggcagggaattagaatttctctctctcttttaatagttttattttgtctgtcctgtttgttcatttggatgttttaatttttaaaaaaaaaaaaactttgctgatatttataattttgtatcataagaatgttttcctctacagtatttgtcatgccagtttataacaaaaaaaaatgcagggattttatttctattggaaacattacagctatgttttacttttggacagaatttttatttgtatagagtgcttactaatgttaaatagttcagagtatataacatttacattaaggactcatggtaggttttagggtaaggagtttaaaggaaataaatattcaaactgggtctcattgccaattttggtggaaatgagtttgtgtcatttcaattacaaagataaaagtatgccatataatttatttatatgaagatttatttttgtagtgtacatagtagtcatcaagtcttttgacagaagtatatttttaaagaatttatatgtgatgaatccataatgtctggaactttgctgagacatgagtgggcacagttttcattgtaaattacagcaaggaaagaaaatgtttaacagtgttaagagagtcagagcagagtggatattcatgcgattatgaagtgtttattagttaccattggcgacctagcatgcttctcatttcaaaccttggaaggtgaaaatgtacaaactctctaaataattaatgttcaaacactgatagaaattctaacatgaataaaaaataatataacttgttggttatatctttgtttgtagaatgctttttttctttaaaatacttgggagagacagttagtgttggagccatcagaaactgttgtttcatcttgctgaccttgtgacactcttcttttttgctctatctgatggagagagttttaggttttcctcctttttgttttgtataaatagtgggtataagcatagctctgttacatggatgtattacaaagtgggggctgagcttttagtgtgatcatcacccaaatagtgtacattgtacccattaattaatttcttatcacctgaccctatttttgttttctcataccaagaaacttcctaagttaaccatcaaaattagtccttctgtcatctctcttagcatacttatttcccttatgtgatgcctaataatgagggaacataaataaagccaaattcaaagataaaaaaaaaaaaaa

SEQ ID NO: 48 - DNA, 11795 bp, Homo sapiens
  misc_feature: tetratricopeptide repeat domain 28
gggggcgcgcgcgcggtttgggggcagtgaggggcgccgcggcggcgcgcagcacggcgggaacatggcgcgcggaaccggcgcgcgcgcctagctggcgggaccgttagctcgaggcggacgcggcccgggccccgtggggatggagcagtcgccgccgccggcgcccgagccgacccaagggccgacccccgcaaggagccgaaggcggcgggagccagagtcgccgccggcgtcggcgccgattcctctctttggtgctgacactattggccagagaagtcctgatggaccggtactgagcaaagctgaatttgttgagaaagttcgtcagagtaatcaggcctgtcatgatggagatttccacacagctattgttctgtataatgaagccctggctgttgaccctcagaactgcatcttatacagcaatagatctgcagcctacatgaaaatccagcagtatgacaaggcactggatgatgcaatcaaagctcgacttctcaatcccaagtggccaaaggcatacttccgacagggtgttgccctccagtaccttggacgtcatgccgatgccctggcagcctttgcatctggactggctcaagaccccaagagtctccagcttctggtggggatggtggaagccgccatgaaatctcccatgagagactccctcgagcccacttatcagcagcttcagaaaatgaaactggacaagagtccctttgtggtcgtgtctgtggttgggcaggaactcctgacagctggccatcatggggcctctgtggttgtcttagaagccgcactgaagattggcacctgcagcctcaaactgagaggttctgttttctctgccctgagcagtgcttactggtctcttggaaatacagagaagagcaccggatatatgcagcaggacttggatgtagccaagaccttaggtgaccagacaggagaatgccgagctcatgggaatctgggctctgcattcttctccaaaggaaattaccgggaggctctcactaaccacaggcatcagttggtactcgccatgaaactcaaagatcgagaggcagcttcatcagccttgagcagtctgggccacgtgtacacagccattggagactaccccaatgcactggccagtcacaaacagtgtgttcttcttgccaagcaatccaaagatgaactttctgaagcccgagaacttggcaacatgggagctgtgtatattgccatgggtgactttgagaatgctgtgcagtgccatgagcagcatctgaagatagccaaggacctggggaacaagcgagaagaggcccgggcttatagcaacctgggcagtgcctatcactaccggaggaactttgacaaggccatgtcttaccataactatgtcctggagctggcacaggagttgatggagaaggctattgagatgcgggcctatgctggactaggccatgctgccaggtgcatgcaggatttggagagagctaaacaataccatgagcagcagctgggcattgctgaggatctcaaggaccgggctgcagaggggcgagcatcctccaatctaggaatcatacaccagatgaaaggtgattatgacactgcactgaaactccacaagacccacctgtgcattgcccaggagctgagtgattatgctgcccagggccgtgcctatgggaatatgggcaatgcctacaatgccctgggcatgtacgaccaggcggtcaaataccatcggcaggagctgcagatctccatggaagtgaatgaccgcgcctcacaggcctccacacatgggaaccttgccgtggcctaccaggccctgggtgcccatgaccgggccctgcaacactatcagaaccacttgaacatcgcccgggagctacgagacatccagagcgaggcccgggccctcagcaacctgggcaatttccactgctctcggggagagtatgtccaggctgccccctattatgaacagtacctccggcttgctcccgaccttcaagacatggaaggagaagggaaggtctgccacaatcttggctatgcccattactgccttggaaactatcaggaggcagtgaagtactacgaacaggatctggcactggctaaagaccttcacgacaagttgagccaagcaaaagcctactgcaacttgggcctagcattcaaggctctgctgaatttcagtaaagctgaagagtgtcagaagtacctactgtccctagcccagtctctgaataattcccaggctaaatttcgagccctaggaaacctgggcgatatattcatctgtaaaaaagatataaatggtgcaataaaattctatgagcagcaactgggcttagctcaccaggtaaaggacagaagattagaagccagtgcatatgcagccctgggcactgcataccgaatgatccagaagtatgacaaggccctgggttatcacacacaggaactggaggtatatcaggagctgagtgacttgccaggggagtgcagagctcatgggcacctggctgctgtctacatggcccttgggaaatacacaatggcattcaagtgttatgaagagcaactggatctagggcaaaagctgaaggatccgagtctggaagcccaggtctatggcaacatgggcatcacaaagatgaacatgaatgtgatggaagaagccattggctactttgagcagcaattggccatgctgcagcagctaagtggaaatgagtctgtgctcgacaggggccgggcctatggcaacctgggggattgctacgaagccctgggtgactatgaggaagctatcaaatactatgaacaatatttatctgtcgcgcagagtctgaatcgcatgcaagaccaagccaaggcttaccggggcctgggaaatggacacagggcaatggggagcttgcagcaagcccttgtgtgctttgaaaagaggctcgtggttgctcatgaacttggagaggccttcaataaagcccaggcctatggagagctgggaagtctgcacagccaattagggaattacgaacaagccatttcctgccttgaacgccagctgaacattgctagagatatgaaagaccgagccctggagagtgacgcagcctgtggcctggggggcgtttaccagcagatgggggagtatgacacagccctgcagtaccaccagcttgatctacagatagcagaggaaaccaacaaccccacgtgccagggccgagcctatgggaacctgggcctgacttatgaatccctgggcaccttcgagagggctgtggtctatcaagaacagcacttgagcattgctgcacagatgaatgacttggcggccaagacggtgtcatatagtagccttggaaggacccatcatgccttgcagaactattcccaagcagtcatgtacttacaggaaggtttaaggttagctgagcaactgggccgaagagaagatgaggcaaaaattcgccatggccttggcctctccctttgggctagtggaaacttggaggaggcccaacaccagctttatagggcatcagccttgtttgaaacaatccgacatgaggcacagctgagcacggactacaaactctccctctttgacctgcagacatcatcctaccaggccttgcagcgggtgctcgtcagcctaggccatcatgatgaagccctggctgtggcagaaaggggacggacaagggcatttgctgatcttctggtggaacgacaaacaggacaacaagactccgacccctactccccagtcactattgatcagatcttagagatggtaaatggccagaggggactagtgctttactattccctggctgcaggctatctgtatagctggctgctggctcctggggcaggaattgtgaagtttcatgaacactacctgggtgagaacacagtggaaaactcaagtgacttccaggccagcagcagtgtaacccttccaacagcaaccggctcagccctggagcagcacattgccagtgtccgggaggccctgggggtggagtctcactactcaagggcctgtgccagcagtgagacagagagtgaagcgggagacatcatggaccagcaatttgaagagatgaacaacaaactcaactcggtcactgaccccactggctttctgcggatggttcgccgcaataacctgtttaacaggagctgccagagcatgacgagcctgttcagtaacactgtgtcaccgacccaggacgggacctcctctcttcccaggaggcagagctcgtttgccaagcccccgctccgtgccctgtatgacctgctcatcgcgcccatggaagggggcctgatgcactccagcggccccgtgggccggcaccggcagctcatcctggttctggagggggagctctacctcattcctttcgccctcctgaagggaagctcctccaatgagtacctctacgagcgcttcggcctccttgctgtcccttccatccgctccctcagcgtgcagtccaagtctcacttacggaagaacccgcccacatactccagctccacatccatggcggctgtcatcggcaaccccaagctaccatcggccgtgatggacaggtggctgtgggggcccatgccatcggccgaggaagaggcctacatggtgtccgagctgctgggctgccagcccctagtgggcagtgtggccaccaaggagagggtcatgagtgccctgacccaggctgaatgcgtccactttgccacccacatctcctggaagctgtcggccttggtcctcacgcccagcatggacggcaaccctgccagcagcaagagctccttcggccacccctacacgatccctgagtccttgcgggtgcaggacgatgccagtgatggggagagcatctcggactgcccgcccctgcaggagctgctgcttactgccgccgacgtcctggacctgcagctgcctgtgaagctggtggtgcttggctcctcccaggagtccaacagcaaagtcacagccgacggggtcatcgcgctgacaagggccttcctggctgccggcgctcagtgtgtcctcgtgtctctgtggcctgtgccagtggctgcttctaagatgttcatccatgccttctactcatccctgctgaacggcctgaaagccagcgccgccctgggggaggccatgaaggtggtgcagagcagcaaggccttctcgcacccctccaactgggcagggttcatgctcatcgggagtgacgttaagctgaacagcccctcatcactcatcggccaggccctcacagagatcctgcagcacccggagcgtgcgcgggacgccctgcgagtgctgctgcacctggtggagaaatccctgcagcgcatccagaatgggcagcgcaatgccatgtacacatcccagcagagtgtggagaacaaagtgggcggcatccctggctggcaggccctcctcaccgctgtgggcttccggctggaccccccaaccagtggcctgccagcggctgtcttcttcccaacctccgacccgggcgaccggctccagcagtgcagcagcacactccagtccctgctgggtctgcccaatcctgccctccaagccctttgcaaactcatcactgcctccgagacgggcgagcagctcatcagccgggctgttaaaaatatggttggaatgctccaccaggtgctggttcagctccaggctggcgagaaggagcaggacttggcatcagctcccattcaggtctccatcagcgtccagctgtggcggctcccgggatgccacgagttcctggcagctctaggttttgatctctgtgaagttggtcaggaggaagtaatcctgaaaaccgggaagcaagctaatcgacggactgtgcacttcgcgctccagtccctgctgtctctgtttgattctactgagctacccaagcgcctcagccttgacagctcctcctccctcgagtctcttgcttctgctcagtctgtttccaacgccctgcccttgggttaccagcaaccccccttctctcccaccggtgcggacagcatcgcctcagatgccatctctgtgtacagtctgagctccattgcctcctcaatgagctttgtctccaaacccgagggtggatcagagggtggaggccccggaggacggcaggaccatgaccggtccaagaacgcttacctgcagagatccaccctgcctaggagccagctgcctccccagacccgccctgcaggcaacaaagatgaagaagaatatgaagggttttctatcatcagtaacgagcccttggcgacctaccaagaaaaccgaaacacatgcttctcaccagaccacaaacaaccccaacctgggacagccggaggcatgagagtctcggtgagctccaaagggagcatcagcactccaaattctccagtgaaaatgactctgattcccagccccaactcacccttccaaaaggtgggaaaactagcaagctcagatacaggagaatcagaccagtctagcacagaaacggacagtaccgtgaaatcccaagaagaaagcaacccaaaactggatccacaagagttagcccagaaaattctggaggagacacagagtcatctcattgcggtggagcgtcttcagaggagcggcggccaggtgagcaagagtaataaccctgaagacggcgttcaggcgcccagcagcactgctgtcttcagagcgtcagaaaccagtgcgttcagcaggcctgttctctcccatcagaagagtcagccatcaccagtcactgttaaaccaaagcccccagccaggagctcctccctgcccaaggtgagttccggatatagcagccccaccacctcagagatgtccatcaaagacagcccgagccagcacagtggccggccatcgcccggctgcgactcacagacttcccagctggaccagcctctctttaaactgaagtaccccagctctccttacagcgctcacatttccaaatcaccaaggaacatgtccccaagctccggccaccagtctcctgctggcagtgcaccctccccagctctctcctactcctcagctggatctgctcgctcaagtccagcagacgctcccgacatagacaaactgaaaatggcagccattgatgaaaaggtgcaggctgtccataacctgaagatgttctggcagagcacaccccagcattccacagggccaatgaagatcttccggggggctcctggcacgatgacttccaaaagggatgtcctcagtctgttgaatttgtcaccacggcacaataagaaggaggagggagtggataagcttgaactgaaggagctgtccctgcagcagcatgacggagctccaccgaaagcccctcccaacggacactggcgcaccgagaccacctcgctgggctcactgccgctgcccgccggccctcccgccacagcccccgcgcgccctttgaggcttccttctggaaatggctacaagttcctgtctccaggaagatttttcccttcttccaaatgctaaagcatcttttatacccactgactctgagcagcctgcagatgggggcctggcgtttgcttcagcccttccctgagtgcagtccccccacagccaccagcaccctcatgatgctgtgctctgcaggcgaggggcaccaccacgtccaaaggctgccacacacactggtggcttttctgggccacattcaccaaaagccaggacttctgtggggctggtacaggaggctcatggaatttcctacacacttcaccaaatgtttgtttacctttgaactccctgcttctcatctttgatatgattcttcaccaggattttgtacaaaaatgatcatggttctggggtggggagaggaaagggagcacatattttgctaagaggtatatatgcagtaccttttatacacagaaatacaaatagagctttttctaaggctttcggttgctggttgggggtgggatatatgaaatttcagttgaattctacaggaaagtgttatattagccaaaaacagaaaaatggtttttaaaatgccaatgatttgtaattaaattgtagcaattttggtctcatgatagtgtaatatctcagcaacaatgcaataattcacattgaaacagcgcttccattctgaactctgctctgcaaatgtcttttgggtcccgctgtcaaccaaacttgaattttcttaaaaaaaaaattatgtaactcttatccaggcattttagaactatgcaattgtgatttaaaatgcaactttgtgcttttaaaacattattgaccttttttgtatatggataaacaacttggttttattatcaatagtactttgcatttatagctattatttttaaaagctcaaaaagttttttaaaatgtcaaattttgaatagtcatcaataagtaattatcaagtttggaaggaaaggttgaaatgactccgtttccttataagcaaaaaaaaaaaaaaaaaaaaaaaaaaaaaaaaaaaaatttccatggctaactagatttaaccagaatcccgccttccaggctcctgttcccttttattagctgctgaattttattcccttttcccaactccaggtccctcagttgtcttatatctaaatcctttgccaggtccccacaatcccagcacctgcctctgtgagctgcccccaggccctcaccttggccctggccagcctcctgtgctcctgctgtctgaaggactggcccctcccccactgctgaagccacacgtacagatcctaagcaacagggccttttgctgggacgtatgcctggattatggccaaccgggaagagagagatgtatcttaaaaagtggaggtggacttctcctacagctctgacggtaacttaaattgttgccagcttgaggcaagacaagggaatcatctagttaggggtaaccattaatttattttataaagaaaggaaatgctgaaagtcgtattagtactgagtttagttggagaatttagataagtaagtatcttttaggtaattctaaaattaaaatcctacccacctcactacagggttcctcatgaaggtgggcggccacctggcctgggccaccagcagcacatggagcagacctgaggggcctggcagggggcactgacctcaggatccccaggtgggggttttaaccatgggtgggatctcagcttctgcgcatacactgacaatctcacctgttcctcagtgtactcctctgaaaagaagaaaggataatatttatccaatctgtgttctcctgagctccatcctaggggtttttaatttaaccaacagccatgttgacaaaagccaacaataagcatgtcttattctagccctgatcccaacactgaaagcgaagtactttataaagaagccagcaattatgagggtttctttatgttagtaggggaaaaaatggtaataaaagtaccagtgtagcaagtgaagaccaaatttatagcactgtgcattagatagcaaaatcaggttcttaacaatgaaaagtaaacctcaagtttctaaatccatatgcagatggttaggctgtccctctcttagcaaatctctcagcctccttctttcccaagtgccaaggatccctggagtaaagctctggggtctgtgctctctttctgtgaggggaaggctgcggccctatttgcccctctctagcaaacacccccaccaccctgccgcttcctgtggttattgagccagctaggagttactcatggactctaacctggttttagtcccatgtacatcgttgttttaggtttcatactgaagagccaatggtttatgtggttttattctgtcttaaatataagtttcaaggaagggaaaacaaaagtgataaaatgatagaacagtctagaggccactgtaaagtcaccgccactttacgtgtatgtcagtcttggtgttcttgtatgagtaaaatggatgtaaaatcataaaatcacagtgaatgtttcaggctacactggaaaaagtatgcacttagaattaaaggaaattgtataattcaccaagatttctttgtgtagatcaggggttggcaactatgacccacaggctaagactggtcagcggtctggtttttcacagccatgagctaagttacctttttaaagggttatataagtaattacatcatatttttgattttgcctttggcccacaccacataaaatattcaatacctggcctttttttttttttttgagacagagtctcgctctgtcacccaggatagagtgcactggtgcgattttggctcactgcaacctcttcctcctgggttcaagcaattctccctgcctcagcctctaagtagctgggactacaggcacccactaccatgccttgctaatttttgtatttttaatagagatggggtttcaccatgttggccaggctggtctcgaactcctgacctcaggggatccgcccgccttggcctcccaaactgctgggattacaggtgagccactgcgcccagccaatacctggccttttaagaagtttgctgactcctggtatggatgacagaaaatggaataacgttttgtttctccagtctaggaaaagcaagtcaggtagtggatagactgactggcgtccggggagcccagggtatgtgagggccacgtggatggaagcaaatgcctcctgcatagcccttggctctttgtcccacttgggaggagtccatggatgtaatatttacaaaacaattttttccttaccatttgcagaaagcattgcatatatttccttttagctcaggaaactggcatgccccaccctctgctactccatcagatgtaaatacaatgactataagccgtacaactcccctctcttagaaacctcagcaggaccacagagcaagggagtcaaagctttcttaattctctccagtaaatgactcaactaatttgatttttttaattaagtcaaaatatcaagagaaaaattgctactaaaacttacattttgatccacactgatgtgcaacacaaaatgaaagttttcacctccattccattttttaaaaattcacggtccacactgaaacttgctgggttttagcaggagacaaaggtgtcacccacgctgtcctcatcctgctctctctgtcccagtgacgctccagcatatgatcactgcagccggtccctggcccgtgccgattctgccacctcccagccacacacatttgcagacccacaagaagaactgtagccttgataatttcagttcaggctggaaaaatgccatgcaataatctggtttgctttcagtaagtaggcaacaagtgaaaactgtataattttcatcacctattctgctgttctatctaaaatgagtgtacctgtggtttgtgaactgggcccttgtttgtgccagatccttcaaagatgttccctgtcaggacacctgtggccctgcccctcctcagacaccttcccactggcattcacgttccttatatgcagtgttagccatctttggcctacgtggactttttttgtaaattacaccatttccagacattaaactttttatattatgaaatttaccatgtaaaaagaacttcatatttttattgagattgctaaggcacttggccttcctcctttgtgattttcagtgtctattaaagcatgagttccctcagttttaa

SEQ ID NO: 49 - protein, 308 aa, Homo sapiens
  misc_feature: carbonic anhydrase 6 (isoform 1)
MRALVLLLSLFLLGGQAQHVSDWTYSEGALDEAHWPQHYPACGGQRQSPINLQRTKVRYNPSLKGLNMTGYETQAGEFPMVNNGHTVQISLPSTMRMTVADGTVYIAQQMHFHWGGASSEISGSEHTVDGIRHVIEIHIVHYNSKYKSYDIAQDAPDGLAVLAAFVEVKNYPENTYYSNFISHLANIKYPGQRTTLTGLDVQDMLPRNLQHYYTYHGSLTTPPCTENVHWFVLADFVKLSRTQVWKLENSLLDHRNKTIHNDYRRTQPLNHRVVESNFPNQEYTLGSEFQFYLHKIEEILDYLRRALN

SEQ ID NO: 50 - protein, 313 aa, Homo sapiens
  misc_feature: carbonic anhydrase 6 (isoform 2)
MRALVLLLSLFLLGGQAQHVSDWTYSEGALDEAHWPQHYPACGGQRQSPINLQRTKVRYNPSLKGLNMTGYETQAGEFPMVNNGHTVQISLPSTMRMTVADGTVYIAQQMHFHWGGASSEISGSEHTVDGIRHVIEIHIVHYNSKYKSYDIAQDAPDGLAVLAAFVEVKNYPENTYYSNFISHLANIKYPGQRTTLTGLDVQDMLPRNLQHYYTYHGSLTTPPCTENVHWFVLADFVKLSRTQVWKLENSLLDHRNKTIHNDYRRTQPLNHRVVESNFPNQGKGHGGHRGRSQNPRVQPTSTRHPLALGSLEA

SEQ ID NO: 51 - protein, 248 aa, Homo sapiens
  misc_feature: carbonic anhydrase 6 (isoform 3)
MRALVLLLSLFLLGGQAQHVSDWTYSVQISLPSTMRMTVADGTVYIAQQMHFHWGGASSEISGSEHTVDGIRHVIEIHIVHYNSKYKSYDIAQDAPDGLAVLAAFVEVKNYPENTYYSNFISHLANIKYPGQRTTLTGLDVQDMLPRNLQHYYTYHGSLTTPPCTENVHWFVLADFVKLSRTQVWKLENSLLDHRNKTIHNDYRRTQPLNHRVVESNFPNQEYTLGSEFQFYLHKIEEILDYLRRALN

SEQ ID NO: 52 - protein, 180 aa, Homo sapiens
  misc_feature: carbonic anhydrase 6 (isoform 4)
MCLTGPTQIHIVHYNSKYKSYDIAQDAPDGLAVLAAFVEVKNYPENTYYSNFISHLANIKYPGQRTTLTGLDVQDMLPRNLQHYYTYHGSLTTPPCTENVHWFVLADFVKLSRTQVWKLENSLLDHRNKTIHNDYRRTQPLNHRVVESNFPNQEYTLGSEFQFYLHKIEEILDYLRRALN

SEQ ID NO: 53 - protein, 94 aa, Homo sapiens
  misc_feature: C-C motif chemokine ligand 17
MAPLKMLALVTLLLGASLQHIHAARGTNVGRECCLEYFKGAIPLRKLKTWYQTSEDCSRDAIVFVTVQGRAICSDPNNKRVKNAVKYLQSLERS

SEQ ID NO: 54 - protein, 374 aa, Homo sapiens
  misc_feature: C-C motif chemokine receptor 6
MSGESMNFSDVFDSSEDYFVSVNTSYYSVDSEMLLCSLQEVRQFSRLFVPIAYSLICVFGLLGNILVVITFAFYKKARSMTDVYLLNMAIADILFVLTLPFWAVSHATGAWVFSNATCKLLKGIYAINFNCGMLLLTCISMDRYIAIVQATKSFRLRSRTLPRSKIICLVVWGLSVIISSSTFVFNQKYNTQGSDVCEPKYQTVSEPIRWKLLMLGLELLFGFFIPLMFMIFCYTFIVKTLVQAQNSKRHKAIRVIIAVVLVFLACQIPHNMVLLVTAANLGKMNRSCQSEKLIGYTKTVTEVLAFLHCCLNPVLYAFIGQKFRNYFLKILKDLWCVRRKYKSSGFSCAGRYSENISRQTSETADNDNASSFTM

SEQ ID NO: 55 - protein, 1142 aa, Homo sapiens
  misc_feature: enamelin
MLVLRCRLGTSFPKLDNLVPKGKMKILLVFLGLLGNSVAMPMHMPRMPGFSSKSEEMMRYNQFNFMNGPHMAHLGPFFGNGLPQQFPQYQMPMWPQPPPNTWHPRKSSAPKRHNKTDQTQETQKPNQTQSKKPPQKRPLKQPSHNQPQPEEEAQPPQAFPPFGNGLFPYQQPPWQIPQRLPPPGYGRPPISNEEGGNPYFGYFGYHGFGGRPPYYSEEMFEQDFEKPKEEDPPKAESPGTEPTANSTVTETNSTQPNPKGSQGGNDTSPTGNSTPGLNTGNNPPAQNGIGPLPAVNASGQGGPGSQIPWRPSQPNIRENHPYPNIRNFPSGRQWYFTGTVMGHRQNRPFYRNQQVQRGPRWNFFAWERKQVARPGNPVYHKAYPPTSRGNYPNYAGNPANLRRKPQGPNKHPVGTTVAPLGPKPGPVVRNEKIQNPKEKPLGPKEQIIVPTKNPTSPWRNSQQYEVNKSNYKLPHSEGYMPVPNFNSVDQHENSYYPRGDSRKVPNSDGQTQSQNLPKGIVLGSRRMPYESETNQSELKHSSYQPAVYPEEIPSPAKEHFPAGRNTWDHQEISPPFKEDPGRQEEHLPHPSHGSRGSVFYPEYNPYDPRENSPYLRGNTWDERDDSPNTMGQKESPLYPINTPDQKEIVPYNEEDPVDPTGDEVFPGQNRWGEELSFKGGPTVRHYEGEQYTSNQPKEYLPYSLDNPSKPREDFYYSEFYPWSPDENFPSYNTASTMPPPIESRGYYVNNAAGPEESTLFPSRNSWDHRIQAQGQRERRPYFNRNIWDQATHLQKAPARPPDQKGNQPYYSNTPAGLQKNPIWHEGENLNYGMQITRMNSPEREHSSFPNFIPPSYPSGQKEAHLFHLSQRGSCCAGSSTGPKDNPLALQDYTPSYGLAPGENQDTSPLYTDGSHTKQTRDIISPTSILPGQRNSSEKRESQNPFRDDVSTLRRNTPCSIKNQLGQKEIMPFPEASSLQSKNTPCLKNDLGGDGNNILEQVFEDNQLNERTVDLTPEQLVIGTPDEGSNPEGIQSQVQENESERQQQRPSNILHLPCFGSKLAKHHSSTTGTPSSDGRQSPFDGDSITPTENPNTLVELATEEQFKSINVDPLDADEHSPFEFLQRGTNVQDQVQDCLLLQA

SEQ ID NO: 56 - protein, 678 aa, Homo sapiens
  misc_feature: growth arrest specific 6
MAPSLSPGPAALRRAPQLLLLLLAAECALAALLPAREATQFLRPRQRRAFQVFEEAKQGHLERECVEELCSREEAREVFENDPETDYFYPRYLDCINKYGSPYTKNSGFATCVQNLPDQCTPNPCDRKGTQACQDLMGNFFCLCKAGWGGRLCDKDVNECSQENGGCLQICHNKPGSFHCSCHSGFELSSDGRTCQDIDECADSEACGEARCKNLPGSYSCLCDEGFAYSSQEKACRDVDECLQGRCEQVCVNSPGSYTCHCDGRGGLKLSQDMDTCEDILPCVPFSVAKSVKSLYLGRMFSGTPVIRLRFKRLQPTRLVAEFDFRTFDPEGILLFAGGHQDSTWIVLALRAGRLELQLRYNGVGRVTSSGPVINHGMWQTISVEELARNLVIKVNRDAVMKIAVAGDLFQPERGLYHLNLTVGGIPFHEKDLVQPINPRLDGCMRSWNWLNGEDTTIQETVKVNTRMQCFSVTERGSFYPGSGFAFYSLDYMRTPLDVGTESTWEVEVVAHIRPAADTGVLFALWAPDLRAVPLSVALVDYHSTKKLKKQLVVLAVEHTALALMEIKVCDGQEHVVTVSLRDGEATLEVDGTRGQSEVSAAQLQERLAVLERHLRSPVLTFAGGLPDVPVTSAPVTAFYRGCMTLEVNRRLLDLDEAAYKHSDITAHSCPPVEPAAA

SEQ ID NO: 57 - protein, 586 aa, Homo sapiens
  misc_feature: guanylate binding protein 5
MALEIHMSDPMCLIENFNEQLKVNQEALEILSAITQPVVVVAIVGLYRTGKSYLMNKLAGKNKGFSVASTVQSHTKGIWIWCVPHPNWPNHTLVLLDTEGLGDVEKADNKNDIQIFALALLLSSTFVYNTVNKIDQGAIDLLHNVTELTDLLKARNSPDLDRVEDPADSASFFPDLVWTLRDFCLGLEIDGQLVTPDEYLENSLRPKQGSDQRVQNFNLPRLCIQKFFPKKKCFIFDLPAHQKKLAQLETLPDDELEPEFVQQVTEFCSYIFSHSMTKTLPGGIMVNGSRLKNLVLTYVNAISSGDLPCIENAVLALAQRENSAAVQKAIAHYDQQMGQKVQLPMETLQELLDLHRTSEREAIEVFMKNSFKDVDQSFQKELETLLDAKQNDICKRNLEASSDYCSALLKDIFGPLEEAVKQGIYSKPGGHNLFIQKTEELKAKYYREPRKGIQAEEVLQKYLKSKESVSHAILQTDQALTETEKKKKEAQVKAEAEKAEAQRLAAIQRQNEQMMQERERLHQEQVRQMEIAKQNWLAEQQKMQEQQMQEQAAQLSTTFQAQNRSLLSELQHAQRTVNNDDPCVLL

SEQ ID NO: 58 - protein, 1586 aa, Homo sapiens
  misc_feature: GLI family zinc finger 2
METSASATASEKQEAKSGILEAAGFPDPGKKASPLVVAAAAAAAVAAQGVPQHLLPPFHAPLPIDMRHQEGRYHYEPHSVHGVHGPPALSGSPVISDISLIRLSPHPAGPGESPFNAPHPYVNPHMEHYLRSVHSSPTLSMISAARGLSPADVAQEHLKERGLFGLPAPGTTPSDYYHQMTLVAGHPAPYGDLLMQSGGAASAPHLHDYLNPVDVSRFSSPRVTPRLSRKRALSISPLSDASLDLQRMIRTSPNSLVAYINNSRSSSAASGSYGHLSAGALSPAFTFPHPINPVAYQQILSQQRGLGSAFGHTPPLIQPSPTFLAQQPMALTSINATPTQLSSSSNCLSDTNQNKQSSESAVSSTVNPVAIHKRSKVKTEPEGLRPASPLALTQGQVSGHGSCGCALPLSQEQLADLKEDLDRDDCKQEAEVVIYETNCHWEDCTKEYDTQEQLVHHINNEHIHGEKKEFVCRWQACTREQKPFKAQYMLVVHMRRHTGEKPHKCTFEGCSKAYSRLENLKTHLRSHTGEKPYVCEHEGCNKAFSNASDRAKHQNRTHSNEKPYICKIPGCTKRYTDPSSLRKHVKTVHGPDAHVTKKQRNDVHLRTPLLKENGDSEAGTEPGGPESTEASSTSQAVEDCLHVRAIKTESSGLCQSSPGAQSSCSSEPSPLGSAPNNDSGVEMPGTGPGSLGDLTALDDTPPGADTSALAAPSAGGLQLRKHMTTMHRFEQLKKEKLKSLKDSCSWAGPTPHTRNTKLPPLPGSGSILENFSGSGGGGPAGLLPNPRLSELSASEVTMLSQLQERRDSSTSTVSSAYTVSRRSSGISPYFSSRRSSEASPLGAGRPHNASSADSYDPISTDASRRSSEASQCSGGSGLLNLTPAQQYSLRAKYAAATGGPPPTPLPGLERMSLRTRLALLDAPERTLPAGCPRPLGPRRGSDGPTYGHGHAGAAPAFPHEAPGGGARRASDPVRRPDALSLPRVQRFHSTHNVNPGPLPPCADRRGLRLQSHPSTDGGLARGAYSPRPPSISENVAMEAVAAGVDGAGPEADLGLPEDDLVLPDDVVQYIKAHASGALDEGTGQVYPTESTGFSDNPRLPSPGLHGQRRMVAADSNVGPSAPMLGGCQLGFGAPSSLNKNNMPVQWNEVSSGTVDALASQVKPPPFPQGNLAVVQQKPAFGQYPGYSPQGLQASPGGLDSTQPHLQPRSGAPSQGIPRVNYMQQLRQPVAGSQCPGMTTTMSPHACYGQVHPQLSPSTISGALNQFPQSCSNMPAKPGHLGHPQQTEVAPDPTTMGNRHRELGVPDSALAGVPPPHPVQSYPQQSHHLAASMSQEGYHQVPSLLPARQPGFMEPQTGPMGVATAGFGLVQPRPPLEPSPTGRHRGVRAVQQQLAYARATGHAMAAMPSSQETAEAVPKGAMGNMGSVPPQPPPQDAGGAPDHSMLYYYGQIHMYEQDGGLENLGSCQVMRSQPPQPQACQDSIQPQPLPSPGVNQVSSTVDSQLLEAPQIDFDAIMDDGDHSSLFSGALSPSLLHSLSQNSSRLTTPRNSLTLPSIPAGISNMAVGDMSSMLTSLAEESKFLNMMT

SEQ ID NO: 59 - protein, 910 aa, Homo sapiens
  misc_feature: adhesion G protein-coupled receptor F1 (Isoform I)
MKVGVLWLISFFTFTDGHGGFLGKNDGIKTKKELIVNKKKHLGPVEEYQLLLQVTYRDSKEKRDLRNFLKLLKPPLLWSHGLIRIIRAKATTDCNSLNGVLQCTCEDSYTWFPPSCLDPQNCYLHTAGALPSCECHLNNLSQSVNFCERTKIWGTFKINERFTNDLLNSSSAIYSKYANGIEIQLKKAYERIQGFESVQVTQFRNGSIVAGYEVVGSSSASELLSAIEHVAEKAKTALHKLFPLEDGSFRVFGKAQCNDIVFGFGSKDDEYTLPCSSGYRGNITAKCESSGWQVIRETCVLSLLEELNKNFSMIVGNATEAAVSSFVQNLSVIIRQNPSTTVGNLASVVSILSNISSLSLASHFRVSNSTMEDVISIADNILNSASVTNWTVLLREEKYASSRLLETLENISTLVPPTALPLNFSRKFIDWKGIPVNKSQLKRGYSYQIKMCPQNTSIPIRGRVLIGSDQFQRSLPETIISMASLTLGNILPVSKNGNAQVNGPVISTVIQNYSINEVFLFFSKIESNLSQPHCVFWDFSHLQWNDAGCHLVNETQDIVTCQCTHLTSFSILMSPFVPSTIFPVVKWITYVGLGISIGSLILCLIIEALFWKQIKKSQTSHTRRICMVNIALSLLIADVWFIVGATVDTTVNPSGVCTAAVFFTHFFYLSLFFWMLMLGILLAYRIILVFHHMAQHLMMAVGFCLGYGCPLIISVITIAVTQPSNTYKRKDVCWLNWSNGSKPLLAFVVPALAIVAVNFVVVLLVLTKLWRPTVGERLSRDDKATIIRVGKSLLILTPLLGLTWGFGIGTIVDSQNLAWHVIFALLNAFQGFFILCFGILLDSKLRQLLFNKLSALSSWKQTEKQNSSDLSAKPKFSKPFNPLQNKGHYAFSHTGDSSDNIMLTQFVSNE

SEQ ID NO: 60 - protein, 218 aa, Homo sapiens
  misc_feature: adhesion G protein-coupled receptor F1 (Isoform 2)
MKVGVLWLISFFTFTDGHGGFLGKNDGIKTKKELIVNKKKHLGPVEEYQLLLQVTYRDSKEKRDLRNFLKLLKPPLLWSHGLIRIIRAKATTDCNSLNGVLQCTCEDSYTWFPPSCLDPQNCYLHTAGALPSCECHLNNLSQSVNFCERTKIWGTFKINERFTNDLLNSSSAIYSKYANGIEIQLKKAYERIQGFESVQVTQFRMSLLSPKLECNGTI

SEQ ID NO: 61 - protein, 125 aa, Homo sapiens
  misc_feature: interferon induced transmembrane protein 1
MHKEEHEVAVLGAPPSTILPRSTVINIHSETSVPDHVVWSLFNTLFLNWCCLGFIAFAYSVKSRDRKMVGDVTGAQAYASTAKCLNIWALILGILMTIGFILLLVFGSVTVYHIMLQIIQEKRGY

SEQ ID NO: 62 - protein, 159 aa, Homo sapiens
  misc_feature: joining chain of multimeric IgA and IgM
MKNHLLFWGVLAVFIKAVHVKAQEDERIVLVDNKCKCARITSRIIRSSEDPNEDIVERNIRIIVPLNNRENISDPTSPLRTRFVYHLSDLCKKCDPTEVELDNQIVTATQSNICDEDSATETCYTYDRNKCYTAVVPLVYGGETKMVETALTPDACYPD

SEQ ID NO: 63 - protein, 5412 aa, Homo sapiens
  misc_feature: Mucin 4 (isoform A)
MKGARWRRVPWVSLSCLCLCLLPHVVPGTTEDTLITGSKTAAPVTSTGSTTATLEGQSTAASSRTSNQDISASSQNHQTKSTETTSKAQTDTLTQMMTSTLFSSPSVHNVMETAPPDEMTTSFPSSVTNTLMMTSKTITMTTSTDSTLGNTEETSTAGTESSTPVTSAVSITAGQEGQSRTTSWRTSIQDTSASSQNHWTRSTQTTRESQTSTLTHRTTSTPSFSPSVHNVTGTVSQKTSPSGETATSSLCSVTNTSMMTSEKITVTTSTGSTLGNPGETSSVPVTGSLMPVTSAALVTFDPEGQSPATFSRTSTQDTTAFSKNHQTQSVETTRVSQINTLNTLTPVTTSTVLSSPSGFNPSGTVSQETFPSGETTTSSPSSVSNTFLVTSKVFRMPTSRDSTLGNTEETSLSVSGTISAITSKVSTIWWSDTLSTALSPSSLPPKISTAFHTQQSEGAETTGRPHERSSFSPGVSQEIFTLHETTTWPSSFSSKGHTTWSQTELPSTSTGAATRLVTGNPSTGTAGTIPRVPSKVSAIGEPGEPTTYSSHSTTLPKTTGAGAQTQWTQETGTTGEALLSSPSYSVTQMIKTATSPSSSPMLDRHTSQQITTAPSTNHSTIHSTSTSPQESPAVSQRGHTQAPQTTQESQTTRSVSPMTDTKTVTTPGSSFTASGHSPSEIVPQDAPTISAATTFAPAPTGDGHTTQAPTTALQAAPSSHDATLGPSGGTSLSKTGALTLANSVVSTPGGPEGQWTSASASTSPDTAAAMTHTHQAESTEASGQTQTSEPASSGSRTTSAGTATPSSSGASGTTPSGSEGISTSGETTRFSSNPSRDSHTTQSTTELLSASASHGAIPVSTGMASSIVPGTFHPTLSEASTAGRPTGQSSPTSPSASPQETAAISRMAQTQRTRTSRGSDTISLASQATDTFSTVPPTPPSITSTGLTSPQTETHTLSPSGSGKTFTTALISNATPLPVTYASSASTGHTTPLHVTDASSVSTGHATPLPVTSPSSVSTGHTTPLPVTDTSSESTGHVTPLPVTSFSSASTGDSTPLPVTDTSSASTGHVTPLPVTSLSSASTGDTTPLPVTDTSSASTGHATSLPVTDTSSVSTGHTTPLPVTDTSSASTGHATSLPVTDTSSVSTGHTTPLHVTDASSASTGQATPLPVTSLSSVSTGDTTPLPVTSPSSASTGHATPLLVTDTSSASTGHATPLPVTDASSVSTDHATSLPVTIPSAASTGHTTPLPVTDTSSASTGQATSLLVTDTSSVSTGDTTPLPVTSTSSASTGHVTPLHVTSPSSASTGHATPLPVTSLSSASTGDTMPLPVTSPSSASTGDTTPLPVTDASSVSTGHTTPLHVTDASSASTGQATPLPVTSLSSVSTGDTTPLPVTSPSSASTGHATPLLVTDTSSASTGHATPLPVTDASSVSTDHATSLPVTIPSAASTGHTTPLPVTDTSSASTGQATSLLVTDTSSVSTGDTTPLPVTSTSSASTGHVTPLHVTSPSSASTGHATPLPVTSLSSASTGDTMPLPVTSPSSASTGDTTPLPVTDASSVSTGHTTPLPVTSPSSASTGHTTPLPVTDTSSASKGDTTPLPVTSPSSASTGHTTPLPVTDTSSASTGDTTPLPVTNASSLSTGHATPLHVTSPSSASTGHATPLPVTSTSSASTGHATPLPVTGLSSATTDDTTRLPVTDVSSASTGQATPLPVTSLSSVSTGDTTPLPVTSPSSASTGHASPLLVTDASSASTGQATPLPVTDTSSVSTAHATPLPVTGLSSASTDDTTRLPVTDVSSASTGQAIPLPVTSPSSASTGDTTPLPVTDASSASTGDTTSLPVTIPSSASSGHTTSLPVTDASSVSTGHATSLLVTDASSVSTGDTTPLPVTDTNSASTGDTTPLHVTDASSVSTGHATSLPVTSLSSASTGDTTPLPVTSPSSASSGHTTPLPVTDASSVPTGHATSLPVTDASSVSTGHATPLPVTDASSVSTGHATPLPVTDTSSVSTGQATPLPVTSLSSASTGDTTPLPVTDTSSASTGQDTPLPVTSLSSVSTGDTTPLPVTNPSSASTGHATPLLVTDASSISTGHATSLLVTDASSVSTGHATALHDTDASSLSTGDTTPLPVTSPSSTSTGDTTPLPVTETSSVSTGHATSLPVTDTSSASTGHATSLPVTDTSSASTGHATPLPVTDTSSASTGQATPLPVTSPSSASTGHAIPLLVTDTSSASTGQATPLPVTSLSSASTGDTTPLPVTDASSVSTGHATSLPVTSLSSVSTGDTTPLPVTSPSSASTGHATPLHVTDASSASTGHATPLPVTSLSSASTGDTTPLPVTSPSSASTGHATPLHVTDASSVSTGDTTPLPVTSSSSASSGHTTPLPVTDASSASTGDTTPLPVTDTSSASTGHATHLPVTGLSSASTGDTTRLPVTNVSSASTGHATPLPVTSTSSASTGDTTPLPGTDTSSVSTGHTTPLLVTDASSVSTGDTTRLPVTSPSSASTGHTTPLPVTDTPSASTGDTTPLPVTNASSLSTRHATSLHVTSPSSASTGHATSLPVTDTSAASTGHATPLPVTSTSSASTGDTTPLPVTDTYSASTGQATPLPVTSLSSVSTGDTTPLPVTSPSSASTGHATPLLVTDASSASTGQATPLPVTSLSSVSTGDTTPLPVTSPSSASTGHATSLPVTDTSSASTGDTTSLPVTDTSSAYTGDTTSLPVTDTSSSSTGDTTPLLVTETSSVSTGDTTPLPVTDTSSASTGHATPLPVTNTSSVSTGHATPLHVTSPSSASTGHTTPLPVTDASSVSTGHATSLPVTDASSVFTGHATSLPVTIPSSASSGHTTPLPVTDASSVSTGHATSLPVTDASSVSTGHATPLPVTDASSVSTGHATPLPLTSLSSVSTGDTTPLPVTDTSSASTGQATPLPVTSLSSVSTGDTTPLPVTDTSSASTGHATSLPVTDTSSASTGHATPLPDTDTSSASTGHATLLPVTDTSSASIGHATSLPVTDTSSISTGHATPLHVTSPSSASTGHATPLPVTDTSSASTGHANPLHVTSPSSASTGHATPLPVTDTSSASTGHATPLPVTSLSSVSTGDTTPLPVTSPSSASTGHTTPLPVTDTSSASTGQATALPVTSTSSASTGDTTPLPVTDTSSASTGQATPLPVTSLSSVSTGDTTPLPVTSPSSASTGHATPLLVTDASSASTGQATPLPVTSLSSVSTGDTTPLPVTSPSSASTGHATSLPVTDTSSASTGDTTSLPVTDTSSAYTGDTTSLPVTDTSSSSTGDTTPLLVTETSSVSTGHATPLLVTDASSASTGHATPLHVTSPSSASTGDTTPVPVTDTSSVSTGHATPLPVTGLSSASTGDTTRLPVTDISSASTGQATPLPVTNTSSVSTGDTMPLPVTSPSSASTGHATPLPVTSTSSASTGHATPVPVTSTSSASTGHTTPLPVTDTSSASTGDTTPLPVTSPSSASTGHTTPLHVTIPSSASTGDTSTLPVTGASSASTGHATPLPVTDTSSVSTGHATPLPVTSLSSVSTGDTTPLPVTDASSASTGQATPLPVTSLSSVSTGDTTPLLVTDASSVSTGHATPLPVTDTSSASTGDTTRLPVTDTSSASTGQATPLPVTSLSSVSTGDTTPLLVTDASSVSTGHATPLPVTDTSSASTGDTTRLPVTDTSSASTGQATPLPVTIPSSSSSGHTTPLPVTSTSSVSTGHVTPLHVTSPSSASTGHVTPLPVTSTSSASTGHATPLLVTDASSVSTGHATPLPVTDASSASTGDTTPLPVTDTSSASTGQATPLPVTSLSSVSTGDTTPLPVTDASSASTGHATPLPVTIPSSVSTGDTMPLPVTSPSSASTGHATPLPVTGLSSASTGDTTPLPVTDTSSASTRHATPLPVTDTSSASTDDTTRLPVTDVSSASTGHATPLPVTSTSSASTGDTTPLPVTDTSSVSTGHATSLPVTSRSSASTGHATPLPVTDTSSVSTGHATPLPVTSTSSVSTGHATPLPVTSPSSASTGHATPVPVTSTSSASTGDTTPLPVTNASSLSTGHATPLHVTSPSSASRGDTSTLPVTDASSASTGHATPLPLTSLSSVSTGDTTPLPVTDTSSASTGQATPLPVTSLSSVSTGDTTPLPVTIPSSASSGHTTSLPVTDASSVSTGHGTPLPVTSTSSASTGDTTPLPVTDTSSASTGHATPLPVTDTSSASTGHATPLPVTSLSSVSTGHATPLAVSSATSASTVSSDSPLKMETPGMTTPSLKTDGGRRTATSPPPTTSQTIISTIPSTAMHTRSTAAPIPILPERGVSLFPYGAGAGDLEFVRRTVDFTSPLFKPATGFPLGSSLRDSLYFTDNGQIIFPESDYQIFSYPNPLPTGFTGRDPVALVAPFWDDADFSTGRGTTFYQEYETFYGEHSLLVQQAESWIRKMTNNGGYKARWALKVTWVNAHAYPAQWTLGSNTYQAILSTDGSRSYALFLYQSGGMQWDVAQRSGNPVLMGFSSGDGYFENSPLMSQPVWERYRPDRFLNSNSGLQGLQFYRLHREERPNYRLECLQWLKSQPRWPSWGWNQVSCPCSWQQGRRDLRFQPVSIGRWGLGSRQLCSFTSWRGGVCCSYGPWGEFREGWHVQRPWQLAQELEPQSWCCRWNDKPYLCALYQQRRPHVGCATYRPPQPAWMFGDPHITTLDGVSYTFNGLGDFLLVGAQDGNSSFLLQGRTAQTGSAQATNFIAFAAQYRSSSLGPVTVQWLLEPHDAIRVLLDNQTVTFQPDHEDGGGQETFNATGVLLSRNGSEVSASFDGWATVSVIALSNILHASASLPPEYQNRTEGLLGVWNNNPEDDFRMPNGSTIPPGSPEEMLFHFGMTWQINGTGLLGKRNDQLPSNFTPVFYSQLQKNSSWAEHLISNCDGDSSCIYDTLALRNASIGLHTREVSKNYEQANATLNQYPPSINGGRVIEAYKGQTTLIQYTSNAEDANFTLRDSCTDLELFENGTLLWTPKSLEPFTLEILARSAKIGLASALQPRTVVCHCNAESQCLYNQTSRVGNSSLEVAGCKCDGGTFGRYCEGSEDACEEPCFPSVHCVPGKGCEACPPNLTGDGRHCAALGSSFLCQNQSCPVNYCYNQGHCYISQTLGCQPMCTCPPAFTDSRCFLAGNNFSPTVNLELPLRVIQLLLSEEENASMAEVNASVAYRLGTLDMRAFLRNSQVERIDSAAPASGSPIQHWMVISEFQYRPRGPVIDFLNNQLLAAVVEAFLYHVPRRSEEPRNDVVFQPISGEDVRDVTALNVSTLKAYFRCDGYKGYDLVYSPQSGFTCVSPCSRGYCDHGGQCQHLPSGPRCSCVSFSIYTAWGEHCEHLSMKLDAFFGIFFGALGGLLLLGVGTFVVLRFWGCSGARFSYFLNSAEALP

SEQ ID NO: 64 - protein, 1176 aa, Homo sapiens
  misc_feature: Mucin 4 (isoform D)
MKGARWRRVPWVSLSCLCLCLLPHVVPGMTTPSLKTDGGRRTATSPPPTTSQTIISTIPSTAMHTRSTAAPIPILPERGVSLFPYGAGAGDLEFVRRTVDFTSPLFKPATGFPLGSSLRDSLYFTDNGQIIFPESDYQIFSYPNPLPTGFTGRDPVALVAPFWDDADFSTGRGTTFYQEYETFYGEHSLLVQQAESWIRKMTNNGGYKARWALKVTWVNAHAYPAQWTLGSNTYQAILSTDGSRSYALFLYQSGGMQWDVAQRSGNPVLMGFSSGDGYFENSPLMSQPVWERYRPDRFLNSNSGLQGLQFYRLHREERPNYRLECLQWLKSQPRWPSWGWNQVSCPCSWQQGRRDLRFQPVSIGRWGLGSRQLCSFTSWRGGVCCSYGPWGEFREGWHVQRPWQLAQELEPQSWCCRWNDKPYLCALYQQRRPHVGCATYRPPQPAWMFGDPHITTLDGVSYTFNGLGDFLLVGAQDGNSSFLLQGRTAQTGSAQATNFIAFAAQYRSSSLGPVTVQWLLEPHDAIRVLLDNQTVTFQPDHEDGGGQETFNATGVLLSRNGSEVSASFDGWATVSVIALSNILHASASLPPEYQNRTEGLLGVWNNNPEDDFRMPNGSTIPPGSPEEMLFHFGMTWQINGTGLLGKRNDQLPSNFTPVFYSQLQKNSSWAEHLISNCDGDSSCIYDTLALRNASIGLHTREVSKNYEQANATLNQYPPSINGGRVIEAYKGQTTLIQYTSNAEDANFTLRDSCTDLELFENGTLLWTPKSLEPFTLEILARSAKIGLASALQPRTVVCHCNAESQCLYNQTSRVGNSSLEVAGCKCDGGTFGRYCEGSEDACEEPCFPSVHCVPGKGCEACPPNLTGDGRHCAALGSSFLCQNQSCPVNYCYNQGHCYISQTLGCQPMCTCPPAFTDSRCFLAGNNFSPTVNLELPLRVIQLLLSEEENASMAEVNASVAYRLGTLDMRAFLRNSQVERIDSAAPASGSPIQHWMVISEFQYRPRGPVIDFLNNQLLAAVVEAFLYHVPRRSEEPRNDVVFQPISGEDVRDVTALNVSTLKAYFRCDGYKGYDLVYSPQSGFTCVSPCSRGYCDHGGQCQHLPSGPRCSCVSFSIYTAWGEHCEHLSMKLDAFFGIFFGALGGLLLLGVGTFVVLRFWGCSGARFSYFLNSAEALP

SEQ ID NO: 65 - protein, 1125 aa, Homo sapiens
  misc_feature: Mucin 4 (isoform E)
MKGARWRRVPWVSLSCLCLCLLPHVVPGVSLFPYGAGAGDLEFVRRTVDFTSPLFKPATGFPLGSSLRDSLYFTDNGQIIFPESDYQIFSYPNPLPTGFTGRDPVALVAPFWDDADFSTGRGTTFYQEYETFYGEHSLLVQQAESWIRKMTNNGGYKARWALKVTWVNAHAYPAQWTLGSNTYQAILSTDGSRSYALFLYQSGGMQWDVAQRSGNPVLMGFSSGDGYFENSPLMSQPVWERYRPDRFLNSNSGLQGLQFYRLHREERPNYRLECLQWLKSQPRWPSWGWNQVSCPCSWQQGRRDLRFQPVSIGRWGLGSRQLCSFTSWRGGVCCSYGPWGEFREGWHVQRPWQLAQELEPQSWCCRWNDKPYLCALYQQRRPHVGCATYRPPQPAWMFGDPHITTLDGVSYTFNGLGDFLLVGAQDGNSSFLLQGRTAQTGSAQATNFIAFAAQYRSSSLGPVTVQWLLEPHDAIRVLLDNQTVTFQPDHEDGGGQETFNATGVLLSRNGSEVSASFDGWATVSVIALSNILHASASLPPEYQNRTEGLLGVWNNNPEDDFRMPNGSTIPPGSPEEMLFHFGMTWQINGTGLLGKRNDQLPSNFTPVFYSQLQKNSSWAEHLISNCDGDSSCIYDTLALRNASIGLHTREVSKNYEQANATLNQYPPSINGGRVIEAYKGQTTLIQYTSNAEDANFTLRDSCTDLELFENGTLLWTPKSLEPFTLEILARSAKIGLASALQPRTVVCHCNAESQCLYNQTSRVGNSSLEVAGCKCDGGTFGRYCEGSEDACEEPCFPSVHCVPGKGCEACPPNLTGDGRHCAALGSSFLCQNQSCPVNYCYNQGHCYISQTLGCQPMCTCPPAFTDSRCFLAGNNFSPTVNLELPLRVIQLLLSEEENASMAEVNASVAYRLGTLDMRAFLRNSQVERIDSAAPASGSPIQHWMVISEFQYRPRGPVIDFLNNQLLAAVVEAFLYHVPRRSEEPRNDVVFQPISGEDVRDVTALNVSTLKAYFRCDGYKGYDLVYSPQSGFTCVSPCSRGYCDHGGQCQHLPSGPRCSCVSFSIYTAWGEHCEHLSMKLDAFFGIFFGALGGLLLLGVGTFVVLRFWGCSGARFSYFLNSAEALP

SEQ ID NO: 66 - protein, 7418 aa, Homo sapiens
  misc_feature: Mucin 4 (isoform F)
MKGARWRRVPWVSLSCLCLCLLPHVVPGTTEDTLITGSKTPAPVTSTGSTTATLEGQSTAASSRTSNQDISASSQNHQTKSTETTSKAQTDTLTQMMTSTLFSSPSVHNVMETVTQETAPPDEMTTSFPSSVTNTLMMTSKTITMTTSTDSTLGNTEETSTAGTESSTPVTSAVSITAGQEGQSRTTSWRTSIQDTSASSQNHWTRSTQTTRESQTSTLTHRTTSTPSFSPSVHNVTGTVSQKTSPSGETATSSLCSVTNTSMMTSEKITVTTSTGSTLGNPGETSSVPVTGSLMPVTSAALVTVDPEGQSPVTFSRTSTQDTTAFSKNHQTQSVETTRVSQINTLNTLTPVTTSTVLSSPSGFNPSGTVSQETFPSGETTISSPSSVSNTFLVTSKVFRMPISRDSTLGNTEETSLSVSGTISAITSKVSTIWWSDTLSTALSPSSLPPKISTAFHTQQSEGAETTGRPHERSSFSPGVSQEIFTLHETTTWPSSFSSKGHTTWSQTELPSTSTGAATRLVTGNPSTGAAGTIPRVPSKVSAIGEPGEPTTYSSHSTTLPKTTGAGAQTQWTQETGTTGEALLSSPSYSVTQMIKTATSPSSSPMLDRHTSQQITTAPSTNHSTIHSTSTSPQESPAVSQRGHTQAPQTTQESQTTRSVSPMTDTKTVTTPGSSFTASGHSPSEIVPQDAPTISAATTFAPAPTGDGHTTQAPTTALQAAPSSHDATLGPSGGTSLSKTGALTLANSVVSTPGGPEGQWTSASASTSPDTAAAMTHTHQAESTEASGQTQTSEPASSGSRTTSAGTATPSSSGASGTTPSGSEGISTSGETTRFSSNPSRDSHTTQSTTELLSASASHGAIPVSTGMASSIVPGTFHPTLSEASTAGRPTGQSSPTSPSASPQETAAISRMAQTQRTRTSRGSDTISLASQATDTFSTVPPTPPSITSSGLTSPQTQTHTLSPSGSGKTFTTALISNATPLPVTYASSASTGHTTPLHVTDASSVSTGHATPLPVTDTSSESTGHATPLPVTSPSSVSTGHTTPLPVTDTSSESTGHVTPLPVTSLSSASTGDSTPLPVTDTSSASTGHVTPLPVTSLSSASTGDTTPLPVTDTSSASTGHATSLPVTDTSSVSTGHTTPLPVTDTSSASTGHATSLPVTDTSSVSTAHATPLPVTGLSSASTDDTTRLPVTDVSSASTGQAIPLPVTSPSSASTGDTTPLPVTDASSASTGDTTSLPVTIPSSASSGHTTSLPVTDASSVSTGHATSLLVTDASSVSTGDTTPLPVTDTNSASTGDTTPLHVTDASSVSTGHATSLPVTSLSSASTGDTTPLPVTSPSSASSGHTTPLPVTDASSVPTGHATSLPVTDASSVSTGHATPLPVTDASSVSTGHATPLPVTDTSSVSTGQATPLPVTSLSSASTGDTTPLPVTDTSSASTGQDTPLPVTSLSSVSTGDTTPLPVTSPSSASTGHATPLLVTDASSVSTGHATSLLVTDASSVSTGHATALHVTDASSLSTGDTTPLPVTSPSSASTGDTTPLPVTDTSSASTGHATSLPVTDTSSASTGHATPLPVTDTSSASTGQATPLPVTGPSSASTGHAIPLLVTDTSSASTGQATPLPVTSLSSASTGDTTPLPVTDASSVSTGHATSLPVTSLSSVSTGDTTPLPVTSPSSASSGHTTPLPVTDASSVSTGDTTPLPVTSPSSASSGHTTPLPVTSPSSASSGHTTPLPVTDASSASTGDTTPLPVTDTSSASTGHATHLPVTGLSSASTGDTTRLPVTNVSSASTGHATPLPVTSTSSASTGDTTPLPGTDTSSVSTGHTTPLLVTDASSVSTGDTTRLPVTSPSSASTGHTTPLPVTDTPSASTGDTTPLPVTNASSLSTRHTTSLHVTSPSSASTGHATSLPVTDTSSVSTGHATPLHVTSPSSASTGDTTPLPVTDTYSASTGQATPLPVTDTSSASTGDTTPLPVTDTSSASTGHATPLPVTNTSSVSTGHATPLHVTSPSSASTGHTTPLPVTDASSVSTGHATSLPVTDASSVFTGHATSLPVTIPSSASSGHTTPLPVTDASSVSTGHATSLPVTDASSVSTGHATPLPVTDASSVSTGHATPLPVTDTSSVSTGHATPLPLTSLSSVSTGDTTPLPVTDTSSASTGQATPLPVTSLSSVSTGDTTPLPVTDTSSASTGHATSLPVTDTSSASTGHATPLPDTDTSSASTGHATPLPVTDTSSASTGHATLLPVTDTSSASIGHATPLPVTDTSSISTGHATPLHVTSPSSASTGHATPLPVTDTSSASTGHANPLHVTSPSSASTGHATPLPVTDTSSASTGHATPLPVTSLSSVSTGDTTPLPVTSPSSASTGHTTPLPVTDTSSASTGQATALPVTSTSSASTGDTTPLPVTDTSSASTGQATPLPVTSLSSVSTGDTTPLPVTSPSSASTGHATPLLVTDASSASTGQATPLPVTDTSSAYTGDTTSLPVTDTSSSSTGDTTPLLVTETSSASTGHATPLHVTSPSSASTGDTTPVPVTDTSSVSTGHATPLPVTGLSSASTGDTTRLPVTDISSASTGQATPLPVTNTSSASTGHATPLPVTGLSSASTGDTTRLPVTDISSASTGQATPLPVTNTSSVSTGDTMPLPVTSPSSASTGHATPLPVTSTSSASTGHATPVPVTSTSSASTGHTTPLPVTDTSSASTGDTTPLPVTSPSSASTGHTTPLHVTIPSSASTGDTSTLPVTGASSASTGHATPLPVTDTSSVSTGHATPLPVTSFSSVSTGDTTPLPVTDTSSVSTGHATPLPVTSFSSVSTGDTTPLPVTDASSASTGHATPLPVTDTSSVSTGHATPLPLTSLSSVSTGDTTTLPVTDTSSVSTGHATPLPVTSFSSVSTGDTTPLPVTDASSASTGHATPLPVTDTSSVSTGHATPLPVTSLSSVSTGDTTPLPVTDASSASTGQATPLPVTSLSSVSTGDTTPLPVTIPSSASSGHTTSLPVTDTSSASTGQATPLPVTSLSSVSTGDTTPLLVTDASSVSTGHATPLPVTDTSSASTGDTTRLPVTDTSSASTGQATPLPVTSLSSVSTGDTTPLLVTNTSSVSRGHATSLPVTIPSSSSSGHTTPLPVTSTSSVSTGHVTPLPVTSTSSASTGHATSLPVTDTSSVSTGHATSLPVTDTSSVSTGHATPLPVTDASSVSTGHATPLPVTDASSASTGDTTPLPVTNTSSASTGQATPLPVTSLSSVSTGDTMPLPVTSPSSASTGHATPLPVTGLSSASTGDTTPLPVTDTSSASTGHVTPLPVTSLSSASTGDSTPLPVTDTSSASTGHVTPLPVTSLSSASTGDTTPLPVTDTSSASTGHATPLHVTDASSASTGQATLLPVTSLSSVSTGDTTPLPVTSPSSASTGHATPLLVTDTSSASTGHATPLPVTDASSVSTGHATSLPVTIRSSGSTGHTTPLPVTDTSSASTGQATSLLVTDTSSVSTGDTTPLPVTSTSSASTGHVTPLHVTSPSSASTGHATPLPVTSLSSASTGDTMPLPVTSPSSASTGDTTPLPVTDASSVSTGHTTPLPVTSPSSASTGHTTPLPVTDTTSASKGDTTPLPVTSPSSASTGHTTPLPVTDTSSASTGDTTPLPVTSPSSASTGHATPLPVTNASSLSTGHATPLHVTSPSSASTGHATPLPVTSTSSASTGHATSLPVTSTSSASTGHATPLPVTDNSSVSTGHATPLPVTGLSSATTDDTTRLPVTDVSSASTGQATPLPVTSLSSVSTGDTTPLPVTSPSSASTGHASPLLVTDASSASTGQATPLPVTDTSSVSTAHATPLPVTGLSSASTDDTTRLPVTDVSSASTGQAIPLPVTSPSSASTGDTTPLPVTDASSASTGDTTSLPVTIPSSASSGHTTSLPVTDASSVSTGHATSLLVTDASSVSTGDTTPLPVTDTNSASTGDTTPLHVTDASSVSTGHATSLPVTSLSSASTGDTTPLPVTSPSSASSGDTTPLPVTDTSSASTGHATHLPVTGLSSASTGDTTRLPVTNVSSASTGHATPLPVTSTSSASTGDTTPLPGTDTSSVSTGHTTPLLVTDASSVSTGDTTRLPVTSPSSASTGHTTPLHVTDASSVSTGHTTPLPVTDTSSASTGQATSLLVTDTSSVSTGDTTPLPVTSTSSASTGHVTPLHVTSPSSASTGHATPLPVTSLSSASTGDTTPLPVTDTSSVSTGHTTPLPVTSPSSASTGHTTPLPVTDTSSASKGDTTPLPVTSPSSASTGHTTPLPVTDTSSASTGDTTPLPVTNASSLSTGHATPLHVTSPSSASTGHATPLPVTSTSSASTGHATPLPVTSTSSASTGHATPLPVTDNSSVSTGHATPLPVTGLSSATTDDTTRLPVTDVSSASTGQATPLPVTSLSSVSTGDTTPLPVTSPSSASTGHASPLLVTDASSASTGQATPLPVTDTSSVSTAHATPLPVTGLSSASTDDTTRLPVTDVSSASTGQAIPLPVTSPSSASTGDTTPLPVTDASSASTGDTTSLPVTIPSSASSGHTTSLPVTDASSVSTGHATSLLVTDASSVSTGDTTPLPVTDTNSASTGDTTPLHVTDASSVSTGHATSLPVTSLSSASTGDTTPLPVTSPSSASSGHTTSLPVTDASSVSTGHATSLPVTIPSSASSGHTTPLPVTDASSVPTGHATSLPVTDASSVSTGHATPLPVTDASSVSTGHATPLPVTDTSSVSTGQATPLPVTSLSSASSTGDTTPLPVTDTSSASTGQDTPLPVTSLFSVSTGDTTPLPVTSPSSASTGHATHLLVTDASSVSTGHATSLLVTDASSVSTGHATALHVTDASSLSTGDTTPLPVTSPSSASTGDTTPLPVTDTSSVSTGHATSLPVTDTSSASTGHATSLPVTDTSSASTGQATPLPVTSPSSASTGHAIPLLVTDTSSASTGQATPLPVTSLSSASTGDTTPLPVTDASSVSTGHATSLPVTSLSSVSTGDTTPLPVTSPSSASTGHATPLHVTSPSSASTGHATPLPVTSLSSASTGDTTPLPVTSPSSASTGHATPLHVTDASSVSTGDTTPLPVTSPSSASSGHTTPLPVTDASSASTGDTTPLPVTDTSSASTGHATHLPVTGLSSASTGDTTRLPVTDVSSASTGHATPLPVTSTSSASTGDTTPLPGTDTSSVSTGHTTPLLVTDASSVSTGDTTRLPVTSPSSASTGHTTPLPVTDTPSASTGDTTPLPVTNASSLSTRHATSLHVTSPSSASTGHATPLPVTDTSAASTGHATPLPVTSTSSASTGDTTPLPVTDTSSASTGHATPLPVTNTSSVSTGHATPLHVTSPSSASTGHTTPLPVTDASSVSTGHATSLPVTDASSVSTGHATPLPVTDASSVSTGHATPLPLTSLSSVSTGDTTPLPVTDTSSASTGQATPLPVTSLSSVSTGDTTPLPVTDTSSASTGHATSLPVTDTSSASTGHATPLPVTDTSSISTGHATPLHVTSPSSASTGHATPLPVTDTSSASTGHATPLPVTSLSSVSTGDTTPLPVTSPSSASTGHATPLLVTDASSASTGQATPLPVTSLSSVSTGDTTPLPVTSPSSASTGHATSLPVTDTSSASTGDTTSLPVTDTSSAYTGDTTSLPVTDTSSSSTGDTTPLLVTETSSASTGDTTPVPVTDTSSVSTGHATPLPVTGLSSASTGDTTRLPVTDISSASTGQATPLPVTNTSSVSTGDTMPLPVTSPSSASTGHATPLPVTSTSSASTGHATPVPVTSTSLASTGHTTPLPVTSPSSASTGHTTPLPVTDTSSASTGDTTPLPVTNASSLSTGHTTPLHVTIPSSASTGDTSTLPVTGASSASTGHATPLPVTDTSSVSTGHATPLPVTSFSSVSTGDTTPLPVTDASSASTGHATPLPVTDTSSASTGDTTPLPVTDASSASTGQATPLPVTSLSSVSTGDTTPLPVTIPSSASSGHTTSLPVSDTSSASTGQATPLPVTSLSSVSTGDTTPLLVTDASSVSTGHATPLPVTDTSSASTGDTTRLPVTDTSSASTGQATPLPVTSLSSVSTGDTTPLLVTNTSSVSTGHATSLPVTIPSSSSSGHTTPLPVTSTSSVSTGHVTPLHVTSPSSSSTGQATPLPVTSTSSVSTGHVTPLHVTSPSSASTGHATPLPVTSTSSASTGHATPLPVTDASSVSTGHATPLPVTDTSSASTGDTTPLPVTDTSSASTGQATPLPVTSLSSVSTGHATPLAVSSATSASTVSSDSPLKMETSGMTTPSLKTDGGRRTATSPPPTTSQTIISTIPSTAMHTRSTAAPIPILPERGVSLFPYGADAGDLEFVRRTVDFTSPLFKPATGFPLGSSLRDSLYFTDNGQIIFPESDYQIFSYPNPLPTGFTGRDPVALVAPFWDDADFSTGRGTTFYQEYETFYGEHSLLVQQAESWIRKMTNNGGYKARWALKVTWVNAHAYPAQWTLGSNTYQAILSTDGSRSYALFLYQSGGMQWDVAQRSGNPVLMGFSSGDGYFENSPLMSQPVWERYRPDRFLNSNSGLQGLQFYRLHREERPNYRLECLQWLKSQPRWPSWGWNQVSCPCSWQQGRRDLRFQPVSIGRWGLGSRQLCSFTSWRGGVCCSYGPWGEFREGWHVQRPWQLAQELEPQSWCCRWNDKPYLCALYQQRRPHVGCATYRPPQPAWMFGDPHITTLDGVSYTFNGLGDFLLVGAQDGNSSFLLQGRTAQTGSAQATNFIAFAAQYRSSSLGPVTVQWLLEPHDAIRVLLDNQTVTFQPDHEDGGGQETFNATGVLLSRNGSEVSASFDGWATVSVIALSNILHASASLPPEYQNRTEGLLGVWNNNPEDDFRMPNGSTIPPGSPEEMLFHFGMTWQINGTGLLGKRNDQLPSNFTPVFYSQLQKNSSWAEHLISNCDGDSSCIYDTLALRNASIGLHTREVSKNYEQANATLNQYPPSINGGRVIEAYKGQTTLIQYTSNAEDANFTLRDSCTDLELFENGTLLWTPKSLEPFTLEILARSAKIGLASALQPRTVVCHCNAESQCLYNQTSRVGNSSLEVAGCKCDGGTFGRYCEGSEDACEEPCFPSVHCVPGKGCEACPPNLTGDGRHCAALGSSFLCQNQSCPVNYCYNQGHCYISQTLGCQPMCTCPPAFTDSRCFLAGNNFSPTVNLELPLRVIQLLLSEEENASMAEVNASVAYRLGTLDMRAFLRNSQVERIDSAAPASGSPIQHWMVISEFQYRPRGPVIDFLNNQLLAAVVEAFLYHVPRRSEEPRNDVVFQPISGEDVRDVTALNVSTLKAYFRCDGYKGYDLVYSPQSGFTCVSPCSRGYCDHGGQCQHLPSGPRCSCVSFSIYTAWGEHCEHLSMKLDAFFGIFFGALGGLLLLGVGTFVVLRFWGCSGARFSYFLNSAEALP

SEQ ID NO: 67 - protein, 354 aa, Homo sapiens
  misc_feature: paraoxonase 2 (isoform 1)
MGRLVAVGLLGIALALLGERLLALRNRLKASREVESVDLPHCHLIKGIEAGSEDIDILPNGLAFFSVGLKFPGLHSFAPDKPGGILMMDLKEEKPRARELRISRGFDLASFNPHGISTFIDNDDTVYLFVVNHPEFKNTVEIFKFEEAENSLLHLKTVKHELLPSVNDITAVGPAHFYATNDHYFSDPFLKYLETYLNLHWANVVYYSPNEVKVVAEGFDSANGINISPDDKYIYVADILAHEIHVLEKHTNMNLTQLKVLELDTLVDNLSIDPSSGDIWVGCHPNGQKLFVYDPNNPPSSEVLRIQNILSEKPTVTTVYANNGSVLQGSSVASVYDGKLLIGTLYHRALYCEL

SEQ ID NO: 68 - protein, 342 aa, Homo sapiens
  misc_feature: paraoxonase 2 (isoform 2)
MGRLVAVGLLGIALALLGERLLALRNRLKASREVESVDLPHCHLIKGIEAGSEDIDILPNGLAFFSVGLKFPGLHSFAPDKPGGILMMDLKEEKPRARELRISRGFDLASFNPHGISTFIDNEFKNTVEIFKFEEAENSLLHLKTVKHELLPSVNDITAVGPAHFYATNDHYFSDPFLKYLETYLNLHWANVVYYSPNEVKVVAEGFDSANGINISPDDKYIYVADILAHEIHVLEKHTNMNLTQLKVLELDTLVDNLSIDPSSGDIWVGCHPNGQKLFVYDPNNPPSSEVLRIQNILSEKPTVTTVYANNGSVLQGSSVASVYDGKLLIGTLYHRALYCEL

SEQ ID NO: 69 - protein, 173 aa, Homo sapiens
  misc_feature: protein tyrosine phosphatase type IVA, member 3 (isoform 1)
MARMNRPAPVEVSYKHMRFLITHNPTNATLSTFIEDLKKYGATTVVRVCEVTYDKTPLEKDGITVVDWPFDDGAPPPGKVVEDWLSLVKAKFCEAPGSCVAVHCVAGLGRAPVLVALALIESGMKYEDAIQFIRQKRRGAINSKQLTYLEKYRPKQRLRFKDPHTHKTRCCVM

SEQ ID NO: 70 - protein, 148 aa, Homo sapiens
  misc_feature: protein tyrosine phosphatase type IVA, member 3 (isoform 2)
MARMNRPAPVEVSYKHMRFLITHNPTNATLSTFIEDLKKYGATTVVRVCEVTYDKTPLEKDGITVVDWPFDDGAPPPGKVVEDWLSLVKAKFCEAPGSCVAVHCVAGLGRKRRGAINSKQLTYLEKYRPKQRLRFKDPHTHKTRCCVM

SEQ ID NO: 71 - protein, 1047 aa, Homo sapiens
  misc_feature: semaphorin 6A
MRSEALLLYFTLLHFAGAGFPEDSEPISISHGNYTKQYPVFVGHKPGRNTTQRHRLDIQMIMIMNGTLYIAARDHIYTVDIDTSHTEEIYCSKKLTWKSRQADVDTCRMKGKHKDECHNFIKVLLKKNDDALFVCGTNAFNPSCRNYKMDTLEPFGDEFSGMARCPYDAKHANVALFADGKLYSATVTDFLAIDAVIYRSLGESPTLRTVKHDSKWLKEPYFVQAVDYGDYIYFFFREIAVEYNTMGKVVFPRVAQVCKNDMGGSQRVLEKQWTSFLKARLNCSVPGDSHFYFNILQAVTDVIRINGRDVVLATFSTPYNSIPGSAVCAYDMLDIASVFTGRFKEQKSPDSTWTPVPDERVPKPRPGCCAGSSSLERYATSNEFPDDTLNFIKTHPLMDEAVPSIFNRPWFLRTMVRYRLTKIAVDTAAGPYQNHTVVFLGSEKGIILKFLARIGNSGFLNDSLFLEEMSVYNSEKCSYDGVEDKRIMGMQLDRASSSLYVAFSTCVIKVPLGRCERHGKCKKTCIASRDPYCGWIKEGGACSHLSPNSRLTFEQDIERGNTDGLGDCHNSFVALNDISTPLPDNEMSYNTVYGHSSSLLPSTTTSDSTAQEGYESRGGMLDWKHLLDSPDSTDPLGAVSSHNHQDKKGVIRESYLKGHDQLVPVTLLAIAVILAFVMGAVFSGITVYCVCDHRRKDVAVVQRKEKELTHSRRGSMSSVTKLSGLFGDTQSKDPKPEAILTPLMHNGKLATPGNTAKMLIKADQHHLDLTALPTPESTPTLQQKRKPSRGSREWERNQNLINACTKDMPPMGSPVIPTDLPLRASPSHIPSVVVLPITQQGYQHEYVDQPKMSEVAQMALEDQAATLEYKTIKEHLSSKSPNHGVNLVENLDSLPPKVPQREASLGPPGASLSQTGLSKRLEMHHSSSYGVDYKRSYPTNSLTRSHQATTLKRNNTNSSNSSHLSRNQSFGRGDNPPPAPQRVDSIQVHSSQPSGQAVTVSRQPSLNAYNSLTRSGLKRTPSLKPDVPPKPSFAPLSTSMKPNDACT

SEQ ID NO: 72 - protein, 478 aa, Homo sapiens
  misc_feature: solute carrier family 37 member 3
MAWPNVFQRGSLLSQFSHHHVVVFLLTFFSYSLLHASRKTFSNVKVSISEQWTPSAFNTSVELPVEIWSSNHLFPSAEKATLFLGTLDTIFLFSYAVGLFISGIVGDRLNLRWVLSFGMCSSALVVFVFGALTEWLRFYNKWLYCCLWIVNGLLQSTGWPCVVAVMGNWFGKAGRGVVFGLWSACASVGNILGACLASSVLQYGYEYAFLVTASVQFAGGIVIFFGLLVSPEEIGLSGIEAEENFEEDSHRPLINGGENEDEYEPNYSIQDDSSVAQVKAISFYQACCLPGVIPYSLAYACLKLVNYSFFFWLPFYLSNNFGWKEAEADKLSIWYDVGGIIGGTLQGFISDVLQKRAPVLALSLLLAVGSLIGYSRFFIGGPSNMISSAISADLGRQELIQRSSEALATVTGIVDGSGSIGAAVGQYLVSLIRDKLGWMWVFYFFILMTSCTIVFISPLIVREIFSLVLRRQAHILRE

SEQ ID NO: 73 - protein, 558 aa, Homo sapiens
  misc_feature: spermatogenesis associated serine rich 2 like
MAELNTHVNVKEKIYAVRSVVPNKSNNEIVLVLQQFDFNVDKAVQAFVDGSAIQVLKEWNMTGKKKNNKRKRSKSKQHQGNKDAKDKVERPEAGPLQPQPPQIQNGPMNGCEKDSSSTDSANEKPALIPREKKISILEEPSKALRGVTEGNRLLQQKLSLDGNPKPIHGTTERSDGLQWSAEQPCNPSKPKAKTSPVKSNTPAAHLEIKPDELAKKRGPNIEKSVKDLQRCTVSLTRYRVMIKEEVDSSVKKIKAAFAELHNCIIDKEVSLMAEMDKVKEEAMEILTARQKKAEELKRLTDLASQMAEMQLAELRAEIKHFVSERKYDEELGKAARFSCDIEQLKAQIMLCGEITHPKNNYSSRTPCSSLLPLLNAHAATSGKQSNFSRKSSTHNKPSEGKAANPKMVSSLPSTADPSHQTMPANKQNGSSNQRRRFNPQYHNNRLNGPAKSQGSGNEAEPLGKGNSRHEHRRQPHNGFRPKNKGGAKNQEASLGMKTPEAPAHSEKPRRRQHAADTSEARPFRGSVGRVSQCNLCPTRIEVSTDAAVLSVPAVTLVA

SEQ ID NO: 74 - protein, 183 aa, Homo sapiens
  misc_feature: transmembrane protein 154
MQAPRAALVFALVIALVPVGRGNYEELENSGDTTVESERPNKVTIPSTFAAVTIKETLNANINSTNFAPDENQLEFILMVLIPLILLVLLLLSVVFLATYYKRKRTKQEPSSQGSQSALQTYELGSENVKVPIFEEDTPSVMEIEMEELDKWMNSMNRNADFECLPTLKEEKESNHNPSDSES

SEQ ID NO: 75 - protein, 164 aa, Homo sapiens
  misc_feature: tumor protein p53 inducible nuclear protein 1 (isoform a)
MFQRLNKMFVGEVSSSSNQEPEFNEKEDDEWILVDFIDTCTGFSAEEEEEEEDISEESPTEHPSVFSCLPASLECLADTSDSCFLQFESCPMEESWFITPPPCFTAGGLTTIKVETSPMENLLIEHPSMSVYAVHNSCPGLSEATRGTDELHSPSSPRARKSCL

SEQ ID NO: 76 - protein, 164 aa, Homo sapiens; identical to SEQ ID NO: 75
  misc_feature: tumor protein p53 inducible nuclear protein 1 (isoform b)

SEQ ID NO: 77 - protein, 365 aa, Homo sapiens
  misc_feature: Wnt family member 9A
MLDGSPLARWLAAAFGLTLLLAALRPSAAYFGLTGSEPLTILPLTLEPEAAAQAHYKACDRLKLERKQRRMCRRDPGVAETLVEAVSMSALECQFQFRFERWNCTLEGRYRASLLKRGFKETAFLYAISSAGLTHALAKACSAGRMERCTCDEAPDLENREAWQWGGCGDNLKYSSKFVKEFLGRRSSKDLRARVDFHNNLVGVKVIKAGVETTCKCHGVSGSCTVRTCWRQLAPFHEVGKHLKHKYETALKVGSTTNEAAGEAGAISPPRGRASGAGGSDPLPRTPELVHLDDSPSFCLAGRFSPGTAGRRCHREKNCESICCGRGHNTQSRVVTRPCQCQVRWCCYVECRQCTQREEVYTCKG

SEQ ID NO: 78 - protein, 961 aa, Homo sapiens
  misc_feature: ArfGAP with SH3 domain, ankyrin repeat and PH domain 2
MPDQISVSEFVAETHEDYKAPTASSFTTRTAQCRNTVAAIEEALDVDRMVLYKMKKSVKAINSSGLAHVENEEQYTQALEKFGGNCVCRDDPDLGSAFLKFSVFTKELTALFKNLIQNMNNIISFPLDSLLKGDLKGVKGDLKKPFDKAWKDYETKITKIEKEKKEHAKLHGMIRTEISGAEIAEEMEKERRFFQLQMCEYLLKVNEIKIKKGVDLLQNLIKYFHAQCNFFQDGLKAVESLKPSIETLSTDLHTIKQAQDEERRQLIQLRDILKSALQVEQKEDSQIRQSTAYSLHQPQGNKEHGTERNGSLYKKSDGIRKVWQKRKCSVKNGFLTISHGTANRPPAKLNLLTCQVKTNPEEKKCFDLISHDRTYHFQAEDEQECQIWMSVLQNSKEEALNNAFKGDDNTGENNIVQELTKEIISEVQRMTGNDVCCDCGAPDPTWLSTNLGILTCIECSGIHRELGVHYSRMQSLTLDVLGTSELLLAKNIGNAGFNEIMECCLPAEDSVKPNPGSDMNARKDYITAKYIERRYARKKHADNAAKLHSLCEAVKTRDIFGLLQAYADGVDLTEKIPLANGHEPDETALHLAVRSVDRTSLHIVDFLVQNSGNLDKQTGKGSTALHYCCLTDNAECLKLLLRGKASIEIANESGETPLDIAKRLKHEHCEELLTQALSGRFNSHVHVEYEWRLLHEDLDESDDDMDEKLQPSPNRREDRPISFYQLGSNQLQSNAVSLARDAANLAKEKQRAFMPSILQNETYGALLSGSPPPAQPAAPSTTSAPPLPPRNVGKDPLTPTPPPPVAKTPSVMEALSQPSKPAPPGISQIRPPPLPPQPPSRLPQKKPAPGADKSTPLTNKGQPRGPVDLSATEALGPLSNAMVLQPPAPMPRKSQATKLKPKRVKALYNCVADNPDELTFSEGDVIIVDGEEDQEWWIGHIDGDPGRKGAFPVSFVHFIAD

SEQ ID NO: 79 - protein, 1092 aa, Homo sapiens
  misc_feature: formin like 2
MGNAGSMDSQQTDFRAHNVPLKLPMPEPGELEERFAIVLNAMNLPPDKARLLRQYDNEKKWELICDQERFQVKNPPHTYIQKLKGYLDPAVTRKKFRRRVQESTQVLRELEISLRTNHIGWVREFLNEENKGLDVLVEYLSFAQYAVTFDFESVESTVESSVDKSKPWSRSIEDLHRGSNLPSPVGNSVSRSGRHSALRYNTLPSRRTLKNSRLVSKKDDVHVCIMCLRAIMNYQYGFNMVMSHPHAVNEIALSLNNKNPRTKALVLELLAAVCLVRGGHEIILSAFDNFKEVCGEKQRFEKLMEHFRNEDNNIDFMVASMQFINIVVHSVEDMNFRVHLQYEFTKLGLDEYLDKLKHTESDKLQVQIQAYLDNVFDVGALLEDAETKNAALERVEELEENISHLSEKLQDTENEAMSKIVELEKQLMQRNKELDVVREIYKDANTQVHTLRKMVKEKEEAIQRQSTLEKKIHELEKQGTIKIQKKGDGDIAILPVVASGTLSMGSEVVAGNSVGPTMGAASSGPLPPPPPPLPPSSDTPETVQNGPVTPPMPPPPPPPPPPPPPPPPPPPPPLPGPAAETVPAPPLAPPLPSAPPLPGTSSPTVVFNSGLAAVKIKKPIKTKFRMPVFNWVALKPNQINGTVFNEIDDERILEDLNVDEFEEIFKTKAQGPAIDLSSSKQKIPQKGSNKVTLLEANRAKNLAITLRKAGKTADEICKAIHVFDLKTLPVDFVECLMRFLPTENEVKVLRLYERERKPLENLSDEDRFMMQFSKIERLMQKMTIMAFIGNFAESIQMLTPQLHAIIAASVSIKSSQKLKKILEIILALGNYMNSSKRGAVYGFKLQSLDLLLDTKSTDRKQTLLHYISNVVKEKYHQVSLFYNELHYVEKAAAVSLENVLLDVKELQRGMDLTKREYTMHDHNTLLKEFILNNEGKLKKLQDDAKIAQDAFDDVVKYFGENPKTTPPSVFFPVFVRFVKAYKQAEEENELRKKQEQALMEKLLEQEALMEQQDPKSPSHKSKRQQQELIAELRRRQVKDNRHVYEGKDGAIEDIITDLRNQPYRRADAVRRSVRRRFDDQNLRSVNGAEITM

SEQ ID NO: 80 - protein, 515 aa, Homo sapiens
  misc_feature: G protein-coupled receptor 176 (isoform 1)
MGHNGSWISPNASEPHNASGAEAAGVNRSALGEFGEAQLYRQFTTTVQVVIFIGSLLGNFMVLWSTCRTTVFKSVTNRFIKNLACSGICASLVCVPFDIILSTSPHCCWWIYTMLFCKVVKFLHKVFCSVTILSFPAIALDRYYSVLYPLERKISDAKSRELVMYIWAHAVVASVPVFAVTNVADIYATSTCTEVWSNSLGHLVYVLVYNITTVIVPVVVVFLFLILIRRALSASQKKKVIIAALRTPQNTISIPYASQREAELHATLLSMVMVFILCSVPYATLVVYQTVLNVPDTSVFLLLTAVWLPKVSLLANPVLFLTVNKSVRKCLIGTLVQLHHRYSRRNVVSTGSGMAEASLEPSIRSGSQLLEMFHIGQQQIFKPTEDEEESEAKYIGSADFQAKEIFSTCLEGEQGPQFAPSAPPLSTVDSVSQVAPAAPVEPETFPDKYSLQFGFGPFELPPQWLSETRNSKKRLLPPLGNTPEELIQTKVPKVGRVERKMSRNNKVSIFPKVDS

SEQ ID NO: 81 - protein, 514 aa, Homo sapiens
  misc_feature: G protein-coupled receptor 176 (isoform 2)
MGHNGSWISPNASEPHNASGAEAAGVNRSALGEFGEAQLYRQFTTTVQVVIFIGSLLEFGNMEVTRKLDKSRLPGIKFIKNLACSGICASLVCVPFDIILSTSPHCCWWIYTMLFCKVVKFLHKVFCSVTILSFPAIALDRYYSVLYPLERKISDAKSRELVMYIWAHAVVASVPVFAVTNVADIYATSTCTEVWSNSLGHLVYVLVYNITTVIVPVVVVFLFLILIRRALSASQKKKVIIAALRTPQNTISIPYASQREAELHATLLSMVMVFILCSVPYATLVVYQTVLNVPDTSVFLLLTAVWLPKVSLLANPVLFLTVNKSVRKCLIGTLVQLHHRYSRRNVVSTGSGMAEASLEPSIRSGSQLLEMFHIGQQQIFKPTEDEEESEAKYIGSADFQAKEIFSTCLEGEQGPQFAPSAPPLSTVDSVSQVAPAAPVEPETFPDKYSLQFGFGPFELPPQWLSETRNSKKRLLPPLGNTPEELIQTKVPKVGRVERKMSRNNKVSIFPKVDS

SEQ ID NO: 82 - protein, 470 aa, Homo sapiens
  misc_feature: G protein-coupled receptor 176 (isoform 3)
MPAPLLLISRTLGNFMVLWSTCRTTVFKSVTNRFIKNLACSGICASLVCVPFDIILSTSPHCCWWIYTMLFCKVVKFLHKVFCSVTILSFPAIALDRYYSVLYPLERKISDAKSRELVMYIWAHAVVASVPVFAVTNVADIYATSTCTEVWSNSLGHLVYVLVYNITTVIVPVVVVFLFLILIRRALSASQKKKVIIAALRTPQNTISIPYASQREAELHATLLSMVMVFILCSVPYATLVVYQTVLNVPDTSVFLLLTAVWLPKVSLLANPVLFLTVNKSVRKCLIGTLVQLHHRYSRRNVVSTGSGMAEASLEPSIRSGSQLLEMFHIGQQQIFKPTEDEEESEAKYIGSADFQAKEIFSTCLEGEQGPQFAPSAPPLSTVDSVSQVAPAAPVEPETFPDKYSLQFGFGPFELPPQWLSETRNSKKRLLPPLGNTPEELIQTKVPKVGRVERKMSRNNKVSIFPKVDS

SEQ ID NO: 83 - protein, 246 aa, Homo sapiens
  misc_feature: MyoD family inhibitor (isoform 1)
MYQVSGQRPSGCDAPYGAPSAAPGPAQTLSLLPGLEVVTGSTHPAEAAPEEGSLEEAATPMPQGNGPGIPQGLDSTDLDVPTEAVTCQPQGNPLGCTPLLPNDSGHPSELGGTRRAGNGALGGPKAHRKLQTHPSLASQGSKKSKSSSKSTTSQIPLQAQEDCCVHCILSCLFCEFLTLCNIVLDCATCGSCSSEDSCLCCCCCGSGECADCDLPCDLDCGILDACCESADCLEICMECCGLCFSS

SEQ ID NO: 84 - protein, 185 aa, Homo sapiens
  misc_feature: MyoD family inhibitor (isoform 2)
MYQVSGQRPSGCDAPYGAPSAAPGPGQPQGNPLGCTPLLPNDSGHPSELGGTRRAGNGALGGPKAHRKLQTHPSLASQGSKKSKSSSKSTTSQIPLQAQEDCCVHCILSCLFCEFLTLCNIVLDCATCGSCSSEDSCLCCCCCGSGECADCDLPCDLDCGILDACCESADCLEICMECCGLCFSS

SEQ ID NO: 85 - protein, 932 aa, Homo sapiens
  misc_feature: Protocadherin gamma subfamily A, 12 (isoform 1)
MIPARLHRDYKGLVLLGILLGTLWETGCTQIRYSVPEELEKGSRVGDISRDLGLEPRELAERGVRIIPRGRTQLFALNPRSGSLVTAGRIDREELCMGAIKCQLNLDILMEDKVKIYGVEVEVRDINDNAPYFRESELEIKISENAATEMRFPLPHAWDPDIGKNSLQSYELSPNTHFSLIVQNGADGSKYPELVLKRALDREEKAAHHLVLTASDGGDPVRTGTARIRVMVLDANDNAPAFAQPEYRASVPENLALGTQLLVVNATDPDEGVNAEVRYSFRYVDDKAAQVFKLDCNSGTISTIGELDHEESGFYQMEVQAMDNAGYSARAKVLITVLDVNDNAPEVVLTSLASSVPENSPRGTLIALLNVNDQDSEENGQVICFIQGNLPFKLEKSYGNYYSLVTDIVLDREQVPSYNITVTATDRGTPPLSTETHISLNVADTNDNPPVFPQASYSAYIPENNPRGVSLVSVTAHDPDCEENAQITYSLAENTIQGASLSSYVSINSDTGVLYALSSFDYEQFRDLQVKVMARDNGHPPLSSNVSLSLFVLDQNDNAPEILYPALPTDGSTGVELAPRSAEPGYLVTKVVAVDRDSGQNAWLSYRLLKASEPGLFSVGLHTGEVRTARALLDRDALKQSLVVAVQDHGQPPLSATVTLTVAVADSIPQVLADLGSLESPANSETSDLTLYLVVAVAAVSCVFLAFVILLLALRLRRWHKSRLLQASGGGLTGAPASHFVGVDGVQAFLQTYSHEVSLTTDSRKSHLIFPQPNYADMLVSQESFEKSEPLLLSGDSVFSKDSHGLIEQAPPNTDWRFSQAQRPGTSGSQNGDDTGTWPNNQFDTEMLQAMILASASEAADGSSTLGGGAGTMGLSARYGPQFTLQHVPDYRQNVYIPGSNATLTNAAGKRDGKAPAGGNGNKKKSGKKEKK

SEQ ID NO: 86 - protein, 820 aa, Homo sapiens
  misc_feature: Protocadherin gamma subfamily A, 12 (isoform 2)
MIPARLHRDYKGLVLLGILLGTLWETGCTQIRYSVPEELEKGSRVGDISRDLGLEPRELAERGVRIIPRGRTQLFALNPRSGSLVTAGRIDREELCMGAIKCQLNLDILMEDKVKIYGVEVEVRDINDNAPYFRESELEIKISENAATEMRFPLPHAWDPDIGKNSLQSYELSPNTHFSLIVQNGADGSKYPELVLKRALDREEKAAHHLVLTASDGGDPVRTGTARIRVMVLDANDNAPAFAQPEYRASVPENLALGTQLLVVNATDPDEGVNAEVRYSFRYVDDKAAQVFKLDCNSGTISTIGELDHEESGFYQMEVQAMDNAGYSARAKVLITVLDVNDNAPEVVLTSLASSVPENSPRGTLIALLNVNDQDSEENGQVICFIQGNLPFKLEKSYGNYYSLVTDIVLDREQVPSYNITVTATDRGTPPLSTETHISLNVADTNDNPPVFPQASYSAYIPENNPRGVSLVSVTAHDPDCEENAQITYSLAENTIQGASLSSYVSINSDTGVLYALSSFDYEQFRDLQVKVMARDNGHPPLSSNVSLSLFVLDQNDNAPEILYPALPTDGSTGVELAPRSAEPGYLVTKVVAVDRDSGQNAWLSYRLLKASEPGLFSVGLHTGEVRTARALLDRDALKQSLVVAVQDHGQPPLSATVTLTVAVADSIPQVLADLGSLESPANSETSDLTLYLVVAVAAVSCVFLAFVILLLALRLRRWHKSRLLQASGGGLTGAPASHFVGVDGVQAFLQTYSHEVSLTTDSRKSHLIFPQPNYADMLVSQESFEKSEPLLLSGDSVFSKDSHGLIEVSLYQIFFLFFF

SEQ ID NO: 87 - protein, 932 aa, Homo sapiens
  misc_feature: Protocadherin gamma subfamily A, 6 (isoform 1)
MAPPQRHPQRSEQVLLLTLLGTLWGAAAAQIRYSIPEELEKGSFVGNIVKDLGLEPQELAEHGVRIVSRGRMQLFSLNPRNGSLVTAGRIDREELCAQSPRCLVSFNILVEDKLNLYPVEVEIVDINDNTPRFLKEELEVKILENAAPSSRFPLMEVYDPDVGMNSLQGFKLSGNSHFSVDVQSEAHGPKYPELVLEGTLDREGEAVYRLVLTAMDGGDPVRSSVAQILVTVLDVNDNTPMFTQPVYRVSVPENLPVGTPVLAVTATDQDEGVHGEVTYSFVKITEKISQIFCLNVLTGEISTSANLDYEDSSFYELGVEARDGPGLRDRAKVLITILDVNDNVPEVVVTSGSRTIAESAPPGTVIALFQVFDRDSGLNGLVTCSIPRSLPFELEKSVGNYYRLVTNAALDREEVFLYNITVTATDKGTPPLSTETIISLNVADTNDNPPTFPHSSYSVYVLENNPRGASIFSVNALDPDVDQNAQVSYSLAEDTLQGAPLSSYVSINSDTGILYALRSFDYEQLRDLQLWVTASDSGDPPLSSNVSLSLFVLDQNDNAPEILYPALPTDGSTGVELAPRSAEPGYLVTKVVAVDRDSGQNAWLSYRLLKASEPGLFSVGLHTGEVRTARALLDRDALKQSLVVAVQDHGQPPLSATVTLTVAVADRIPDILADLGSLEPSAKPNDSDLTLYLVVAVAAVSCVFLAFVIVLLALRLQRWHKSRLLQASGGGLASMPGSHFVGVEGVRAFLQTYSHEVSLTADSRKSHLIFPQPNYADTLINQESYEKSEPLLITQDLLETKGEPRQLQQAPPNTDWRFSQAQRPGTSGSQNGDDTGTWPNNQFDTEMLQAMILASASEAADGSSTLGGGAGTMGLSARYGPQFTLQHVPDYRQNVYIPGSNATLTNAAGKRDGKAPAGGNGNKKKSGKKEKK

SEQ ID NO: 88 - protein, 818 aa, Homo sapiens
  misc_feature: Protocadherin gamma subfamily A, 6 (isoform 2)
MAPPQRHPQRSEQVLLLTLLGTLWGAAAAQIRYSIPEELEKGSFVGNIVKDLGLEPQELAEHGVRIVSRGRMQLFSLNPRNGSLVTAGRIDREELCAQSPRCLVSFNILVEDKLNLYPVEVEIVDINDNTPRFLKEELEVKILENAAPSSRFPLMEVYDPDVGMNSLQGFKLSGNSHFSVDVQSEAHGPKYPELVLEGTLDREGEAVYRLVLTAMDGGDPVRSSVAQILVTVLDVNDNTPMFTQPVYRVSVPENLPVGTPVLAVTATDQDEGVHGEVTYSFVKITEKISQIFCLNVLTGEISTSANLDYEDSSFYELGVEARDGPGLRDRAKVLITILDVNDNVPEVVVTSGSRTIAESAPPGTVIALFQVFDRDSGLNGLVTCSIPRSLPFELEKSVGNYYRLVTNAALDREEVFLYNITVTATDKGTPPLSTETIISLNVADTNDNPPTFPHSSYSVYVLENNPRGASIFSVNALDPDVDQNAQVSYSLAEDTLQGAPLSSYVSINSDTGILYALRSFDYEQLRDLQLWVTASDSGDPPLSSNVSLSLFVLDQNDNAPEILYPALPTDGSTGVELAPRSAEPGYLVTKVVAVDRDSGQNAWLSYRLLKASEPGLFSVGLHTGEVRTARALLDRDALKQSLVVAVQDHGQPPLSATVTLTVAVADRIPDILADLGSLEPSAKPNDSDLTLYLVVAVAAVSCVFLAFVIVLLALRLQRWHKSRLLQASGGGLASMPGSHFVGVEGVRAFLQTYSHEVSLTADSRKSHLIFPQPNYADTLINQESYEKSEPLLITQDLLETKGEPRQLQVSFFPPKREE

SEQ ID NO: 89 - protein, 930 aa, Homo sapiens
  misc_feature: Protocadherin gamma subfamily B, 6 (isoform 1)
MGGSCAQRRRAGPRQVLFPLLLPLFYPTLSEPIRYSIPEELAKGSVVGNLAKDLGLSVLDVSARKLRVSAEKLHFSVDAESGDLLVKNRIDREQICKERRRCELQLEAVVENPLNIFHVIVVIEDVNDHAPQFDKKEIHLEIFESASAGTRLSLDPATDPDININSIKDYKINSNPYFSLMVRVNSDGGKYPELSLEKLLDREEQRSHSLILTALDGGDPPRSATAHIEISVKDTNDNPPVFSRDEYRISLSENLPPGSPVLQVTATDQDEGVNAEINYYFRSTAQSTKHMFSLDEKTGMIKNNQSFDFEDVERYTMEVEAKDGGGLSTQCKVIIEILDENDNSPEIIITSLSDQILENSPPGMVVALFKTRDLDFGGNGEVRCNIETDIPFKIYSSSNNYYKLVTDGALDREQTPEYNVTIVATDRGKPPLSSSRSITLYVADINDNAPVFDQTSYVVHVAENNPPGASIAQVSASDPDLGLNGHISYSIVASDLEPLAVSSYVSVSAQSGVVFAQRAFDHEQLRAFALTLQARDHGSPTLSANVSLRVLVGDRNDNAPRVLYPALGPDGSAFFDMVPRSAEPGYLVTKVVAVDADSGHNAWLSYHVLQASEPGLFSLGLRTGEVRTARALGDRDAARQRLLVAVRDGGQPPLSATATLHLVFADNLQEILPDLSDRPVLSDPQAELQFYLVVALALISVLFLLAVILAIALRLRRSLSPATWDCFHPGLCVKSGPVVPPNYSEGTLPYSYNLCIAHTGTKEFNFLKCSVPLHSNEDMVCSVSPGALIPPHGGEDLTSHPETLTSQAPPNTDWRFSQAQRPGTSGSQNGDDTGTWPNNQFDTEMLQAMILASASEAADGSSTLGGGAGTMGLSARYGPQFTLQHVPDYRQNVYIPGSNATLTNAAGKRDGKAPAGGNGNKKKSGKKEKK

SEQ ID NO: 90 - protein, 820 aa, Homo sapiens
  misc_feature: Protocadherin gamma subfamily B, 6 (isoform 2)
MGGSCAQRRRAGPRQVLFPLLLPLFYPTLSEPIRYSIPEELAKGSVVGNLAKDLGLSVLDVSARKLRVSAEKLHFSVDAESGDLLVKNRIDREQICKERRRCELQLEAVVENPLNIFHVIVVIEDVNDHAPQFDKKEIHLEIFESASAGTRLSLDPATDPDININSIKDYKINSNPYFSLMVRVNSDGGKYPELSLEKLLDREEQRSHSLILTALDGGDPPRSATAHIEISVKDTNDNPPVFSRDEYRISLSENLPPGSPVLQVTATDQDEGVNAEINYYFRSTAQSTKHMFSLDEKTGMIKNNQSFDFEDVERYTMEVEAKDGGGLSTQCKVIIEILDENDNSPEIIITSLSDQILENSPPGMVVALFKTRDLDFGGNGEVRCNIETDIPFKIYSSSNNYYKLVTDGALDREQTPEYNVTIVATDRGKPPLSSSRSITLYVADINDNAPVFDQTSYVVHVAENNPPGASIAQVSASDPDLGLNGHISYSIVASDLEPLAVSSYVSVSAQSGVVFAQRAFDHEQLRAFALTLQARDHGSPTLSANVSLRVLVGDRNDNAPRVLYPALGPDGSAFFDMVPRSAEPGYLVTKVVAVDADSGHNAWLSYHVLQASEPGLFSLGLRTGEVRTARALGDRDAARQRLLVAVRDGGQPPLSATATLHLVFADNLQEILPDLSDRPVLSDPQAELQFYLVVALALISVLFLLAVILAIALRLRRSLSPATWDCFHPGLCVKSGPVVPPNYSEGTLPYSYNLCIAHTGTKEFNFLKCSVPLHSNEDMVCSVSPGALIPPHGGEDLTSHPETLTSVSFSFLCVIYLIVY

SEQ ID NO: 91 - protein, 228 aa, Homo sapiens
  misc_feature: phospholipase A2 inhibitor and LY6/PLAUR domain containing (isoform 1)
MWVQTHPSSASYKSWGPGTADTHTMRLSRRPETFLLAFVLLCTLLGLGCPLHCEICTAAGSRCHGQMKTCSSDKDTCVLLVGKATSKGKELVHTYKGCIRSQDCYSGVISTTMGPKDHMVTSSFCCQSDGCNSAFLSVPLTNLTENGLMCPACTASFRDKCMGPMTHCTGKENHCVSLSGHVQAGIFKPRFAMRGCATESMCFTKPGAEVPTGTNVLFLHHIECTHSP

SEQ ID NO: 92 - protein, 116 aa, Homo sapiens
  misc_feature: phospholipase A2 inhibitor and LY6/PLAUR domain containing (isoform 2)
MGPKDHMVTSSFCCQSDGCNSAFLSVPLTNLTENGLMCPACTASFRDKCMGPMTHCTGKENHCVSLSGHVQAGIFKPRFAMRGCATESMCFTKPGAEVPTGTNVLFLHHIECTHSP

SEQ ID NO: 93 - protein, 1447 aa, Homo sapiens
  misc_feature: Protein patched homolog 1 (Isoform L)
MASAGNAAEPQDRGGGGSGCIGAPGRPAGGGRRRRTGGLRRAAAPDRDYLHRPSYCDAAFALEQISKGKATGRKAPLWLRAKFQRLLFKLGCYIQKNCGKFLVVGLLIFGAFAVGLKAANLETNVEELWVEVGGRVSRELNYTRQKIGEEAMFNPQLMIQTPKEEGANVLTTEALLQHLDSALQASRVHVYMYNRQWKLEHLCYKSGELITETGYMDQIIEYLYPCLIITPLDCFWEGAKLQSGTAYLLGKPPLRWTNFDPLEFLEELKKINYQVDSWEEMLNKAEVGHGYMDRPCLNPADPDCPATAPNKNSTKPLDMALVLNGGCHGLSRKYMHWQEELIVGGTVKNSTGKLVSAHALQTMFQLMTPKQMYEHFKGYEYVSHINWNEDKAAAILEAWQRTYVEVVHQSVAQNSTQKVLSFTTTTLDDILKSFSDVSVIRVASGYLLMLAYACLTMLRWDCSKSQGAVGLAGVLLVALSVAAGLGLCSLIGISFNAATTQVLPFLALGVGVDDVFLLAHAFSETGQNKRIPFEDRTGECLKRTGASVALTSISNVTAFFMAALIPIPALRAFSLQAAVVVVFNFAMVLLIFPAILSMDLYRREDRRLDIFCCFTSPCVSRVIQVEPQAYTDTHDNTRYSPPPPYSSHSFAHETQITMQSTVQLRTEYDPHTHVYYTTAEPRSEISVQPVTVTQDTLSCQSPESTSSTRDLLSQFSDSSLHCLEPPCTKWTLSSFAEKHYAPFLLKPKAKVVVIFLFLGLLGVSLYGTTRVRDGLDLTDIVPRETREYDFIAAQFKYFSFYNMYIVTQKADYPNIQHLLYDLHRSFSNVKYVMLEENKQLPKMWLHYFRDWLQGLQDAFDSDWETGKIMPNNYKNGSDDGVLAYKLLVQTGSRDKPIDISQLTKQRLVDADGIINPSAFYIYLTAWVSNDPVAYAASQANIRPHRPEWVHDKADYMPETRLRIPAAEPIEYAQFPFYLNGLRDTSDFVEAIEKVRTICSNYTSLGLSSYPNGYPFLFWEQYIGLRHWLLLFISVVLACTFLVCAVFLLNPWTAGIIVMVLALMTVELFGMMGLIGIKLSAVPVVILIASVGIGVEFTVHVALAFLTAIGDKNRRAVLALEHMFAPVLDGAVSTLLGVLMLAGSEFDFIVRYFFAVLAILTILGVLNGLVLLPVLLSFFGPYPEVSPANGLNRLPTPSPEPPPSVVRFAMPPGHTHSGSDSSDSEYSSQTTVSGLSEELRHYEAQQGAGGPAHQVIVEATENPVFAHSTVVHPESRHHPPSNPRQQPHLDSGSLPPGRQGQQPRRDPPREGLWPPPYRPRRDAFEISTEGHSGPSNRARWGPRGARSHNPRNPASTAMGSSVPGYCQPITTVTASASVTVAVHPPPVPGPGRNPRGGLCPGYPETDHGLFEDPHVPFHVRCERRDSKVEVIELQDVECEERPRGSSSN

SEQ ID NO: 94 - protein, 1381 aa, Homo sapiens
  misc_feature: Protein patched homolog 1 (Isoform M)
MGKATGRKAPLWLRAKFQRLLFKLGCYIQKNCGKFLVVGLLIFGAFAVGLKAANLETNVEELWVEVGGRVSRELNYTRQKIGEEAMFNPQLMIQTPKEEGANVLTTEALLQHLDSALQASRVHVYMYNRQWKLEHLCYKSGELITETGYMDQIIEYLYPCLIITPLDCFWEGAKLQSGTAYLLGKPPLRWTNFDPLEFLEELKKINYQVDSWEEMLNKAEVGHGYMDRPCLNPADPDCPATAPNKNSTKPLDMALVLNGGCHGLSRKYMHWQEELIVGGTVKNSTGKLVSAHALQTMFQLMTPKQMYEHFKGYEYVSHINWNEDKAAAILEAWQRTYVEVVHQSVAQNSTQKVLSFTTTTLDDILKSFSDVSVIRVASGYLLMLAYACLTMLRWDCSKSQGAVGLAGVLLVALSVAAGLGLCSLIGISFNAATTQVLPFLALGVGVDDVFLLAHAFSETGQNKRIPFEDRTGECLKRTGASVALTSISNVTAFFMAALIPIPALRAFSLQAAVVVVFNFAMVLLIFPAILSMDLYRREDRRLDIFCCFTSPCVSRVIQVEPQAYTDTHDNTRYSPPPPYSSHSFAHETQITMQSTVQLRTEYDPHTHVYYTTAEPRSEISVQPVTVTQDTLSCQSPESTSSTRDLLSQFSDSSLHCLEPPCTKWTLSSFAEKHYAPFLLKPKAKVVVIFLFLGLLGVSLYGTTRVRDGLDLTDIVPRETREYDFIAAQFKYFSFYNMYIVTQKADYPNIQHLLYDLHRSFSNVKYVMLEENKQLPKMWLHYFRDWLQGLQDAFDSDWETGKIMPNNYKNGSDDGVLAYKLLVQTGSRDKPIDISQLTKQRLVDADGIINPSAFYIYLTAWVSNDPVAYAASQANIRPHRPEWVHDKADYMPETRLRIPAAEPIEYAQFPFYLNGLRDTSDFVEAIEKVRTICSNYTSLGLSSYPNGYPFLFWEQYIGLRHWLLLFISVVLACTFLVCAVFLLNPWTAGIIVMVLALMTVELFGMMGLIGIKLSAVPVVILIASVGIGVEFTVHVALAFLTAIGDKNRRAVLALEHMFAPVLDGAVSTLLGVLMLAGSEFDFIVRYFFAVLAILTILGVLNGLVLLPVLLSFFGPYPEVSPANGLNRLPTPSPEPPPSVVRFAMPPGHTHSGSDSSDSEYSSQTTVSGLSEELRHYEAQQGAGGPAHQVIVEATENPVFAHSTVVHPESRHHPPSNPRQQPHLDSGSLPPGRQGQQPRRDPPREGLWPPPYRPRRDAFEISTEGHSGPSNRARWGPRGARSHNPRNPASTAMGSSVPGYCQPITTVTASASVTVAVHPPPVPGPGRNPRGGLCPGYPETDHGLFEDPHVPFHVRCERRDSKVEVIELQDVECEERPRGSSSN

SEQ ID NO: 95 - protein, 1296 aa, Homo sapiens
  misc_feature: Protein patched homolog 1 (Isoform S)
MFNPQLMIQTPKEEGANVLTTEALLQHLDSALQASRVHVYMYNRQWKLEHLCYKSGELITETGYMDQIIEYLYPCLIITPLDCFWEGAKLQSGTAYLLGKPPLRWTNFDPLEFLEELKKINYQVDSWEEMLNKAEVGHGYMDRPCLNPADPDCPATAPNKNSTKPLDMALVLNGGCHGLSRKYMHWQEELIVGGTVKNSTGKLVSAHALQTMFQLMTPKQMYEHFKGYEYVSHINWNEDKAAAILEAWQRTYVEVVHQSVAQNSTQKVLSFTTTTLDDILKSFSDVSVIRVASGYLLMLAYACLTMLRWDCSKSQGAVGLAGVLLVALSVAAGLGLCSLIGISFNAATTQVLPFLALGVGVDDVFLLAHAFSETGQNKRIPFEDRTGECLKRTGASVALTSISNVTAFFMAALIPIPALRAFSLQAAVVVVFNFAMVLLIFPAILSMDLYRREDRRLDIFCCFTSPCVSRVIQVEPQAYTDTHDNTRYSPPPPYSSHSFAHETQITMQSTVQLRTEYDPHTHVYYTTAEPRSEISVQPVTVTQDTLSCQSPESTSSTRDLLSQFSDSSLHCLEPPCTKWTLSSFAEKHYAPFLLKPKAKVVVIFLFLGLLGVSLYGTTRVRDGLDLTDIVPRETREYDFIAAQFKYFSFYNMYIVTQKADYPNIQHLLYDLHRSFSNVKYVMLEENKQLPKMWLHYFRDWLQGLQDAFDSDWETGKIMPNNYKNGSDDGVLAYKLLVQTGSRDKPIDISQLTKQRLVDADGIINPSAFYIYLTAWVSNDPVAYAASQANIRPHRPEWVHDKADYMPETRLRIPAAEPIEYAQFPFYLNGLRDTSDFVEAIEKVRTICSNYTSLGLSSYPNGYPFLFWEQYIGLRHWLLLFISVVLACTFLVCAVFLLNPWTAGIIVMVLALMTVELFGMMGLIGIKLSAVPVVILIASVGIGVEFTVHVALAFLTAIGDKNRRAVLALEHMFAPVLDGAVSTLLGVLMLAGSEFDFIVRYFFAVLAILTILGVLNGLVLLPVLLSFFGPYPEVSPANGLNRLPTPSPEPPPSVVRFAMPPGHTHSGSDSSDSEYSSQTTVSGLSEELRHYEAQQGAGGPAHQVIVEATENPVFAHSTVVHPESRHHPPSNPRQQPHLDSGSLPPGRQGQQPRRDPPREGLWPPPYRPRRDAFEISTEGHSGPSNRARWGPRGARSHNPRNPASTAMGSSVPGYCQPITTVTASASVTVAVHPPPVPGPGRNPRGGLCPGYPETDHGLFEDPHVPFHVRCERRDSKVEVIELQDVECEERPRGSSSN

SEQ ID NO: 96 - protein, 2481 aa, Homo sapiens
  misc_feature: TTC28
MEQSPPPAPEPTQGPTPARSRRRREPESPPASAPIPLFGADTIGQRSPDGPVLSKAEFVEKVRQSNQACHDGDFHTAIVLYNEALAVDPQNCILYSNRSAAYMKIQQYDKALDDAIKARLLNPKWPKAYFRQGVALQYLGRHADALAAFASGLAQDPKSLQLLVGMVEAAMKSPMRDSLEPTYQQLQKMKLDKSPFVVVSVVGQELLTAGHHGASVVVLEAALKIGTCSLKLRGSVFSALSSAYWSLGNTEKSTGYMQQDLDVAKTLGDQTGECRAHGNLGSAFFSKGNYREALTNHRHQLVLAMKLKDREAASSALSSLGHVYTAIGDYPNALASHKQCVLLAKQSKDELSEARELGNMGAVYIAMGDFENAVQCHEQHLKIAKDLGNKREEARAYSNLGSAYHYRRNFDKAMSYHNYVLELAQELMEKAIEMRAYAGLGHAARCMQDLERAKQYHEQQLGIAEDLKDRAAEGRASSNLGIIHQMKGDYDTALKLHKTHLCIAQELSDYAAQGRAYGNMGNAYNALGMYDQAVKYHRQELQISMEVNDRASQASTHGNLAVAYQALGAHDRALQHYQNHLNIARELRDIQSEARALSNLGNFHCSRGEYVQAAPYYEQYLRLAPDLQDMEGEGKVCHNLGYAHYCLGNYQEAVKYYEQDLALAKDLHDKLSQAKAYCNLGLAFKALLNFSKAEECQKYLLSLAQSLNNSQAKFRALGNLGDIFICKKDINGAIKFYEQQLGLAHQVKDRRLEASAYAALGTAYRMIQKYDKALGYHTQELEVYQELSDLPGECRAHGHLAAVYMALGKYTMAFKCYEEQLDLGQKLKDPSLEAQVYGNMGITKMNMNVMEEAIGYFEQQLAMLQQLSGNESVLDRGRAYGNLGDCYEALGDYEEAIKYYEQYLSVAQSLNRMQDQAKAYRGLGNGHRAMGSLQQALVCFEKRLVVAHELGEAFNKAQAYGELGSLHSQLGNYEQAISCLERQLNIARDMKDRALESDAACGLGGVYQQMGEYDTALQYHQLDLQIAEETNNPTCQGRAYGNLGLTYESLGTFERAVVYQEQHLSIAAQMNDLAAKTVSYSSLGRTHHALQNYSQAVMYLQEGLRLAEQLGRREDEAKIRHGLGLSLWASGNLEEAQHQLYRASALFETIRHEAQLSTDYKLSLFDLQTSSYQALQRVLVSLGHHDEALAVAERGRTRAFADLLVERQTGQQDSDPYSPVTIDQILEMVNGQRGLVLYYSLAAGYLYSWLLAPGAGIVKFHEHYLGENTVENSSDFQASSSVTLPTATGSALEQHIASVREALGVESHYSRACASSETESEAGDIMDQQFEEMNNKLNSVTDPTGFLRMVRRNNLFNRSCQSMTSLFSNTVSPTQDGTSSLPRRQSSFAKPPLRALYDLLIAPMEGGLMHSSGPVGRHRQLILVLEGELYLIPFALLKGSSSNEYLYERFGLLAVPSIRSLSVQSKSHLRKNPPTYSSSTSMAAVIGNPKLPSAVMDRWLWGPMPSAEEEAYMVSELLGCQPLVGSVATKERVMSALTQAECVHFATHISWKLSALVLTPSMDGNPASSKSSFGHPYTIPESLRVQDDASDGESISDCPPLQELLLTAADVLDLQLPVKLVVLGSSQESNSKVTADGVIALTRAFLAAGAQCVLVSLWPVPVAASKMFIHAFYSSLLNGLKASAALGEAMKVVQSSKAFSHPSNWAGFMLIGSDVKLNSPSSLIGQALTEILQHPERARDALRVLLHLVEKSLQRIQNGQRNAMYTSQQSVENKVGGIPGWQALLTAVGFRLDPPTSGLPAAVFFPTSDPGDRLQQCSSTLQSLLGLPNPALQALCKLITASETGEQLISRAVKNMVGMLHQVLVQLQAGEKEQDLASAPIQVSISVQLWRLPGCHEFLAALGFDLCEVGQEEVILKTGKQANRRTVHFALQSLLSLFDSTELPKRLSLDSSSSLESLASAQSVSNALPLGYQQPPFSPTGADSIASDAISVYSLSSIASSMSFVSKPEGGSEGGGPGGRQDHDRSKNAYLQRSTLPRSQLPPQTRPAGNKDEEEYEGFSIISNEPLATYQENRNTCFSPDHKQPQPGTAGGMRVSVSSKGSISTPNSPVKMTLIPSPNSPFQKVGKLASSDTGESDQSSTETDSTVKSQEESNPKLDPQELAQKILEETQSHLIAVERLQRSGGQVSKSNNPEDGVQAPSSTAVFRASETSAFSRPVLSHQKSQPSPVTVKPKPPARSSSLPKVSSGYSSPTTSEMSIKDSPSQHSGRPSPGCDSQTSQLDQPLFKLKYPSSPYSAHISKSPRNMSPSSGHQSPAGSAPSPALSYSSAGSARSSPADAPDIDKLKMAAIDEKVQAVHNLKMFWQSTPQHSTGPMKIFRGAPGTMTSKRDVLSLLNLSPRHNKKEEGVDKLELKELSLQQHDGAPPKAPPNGHWRTETTSLGSLPLPAGPPATAPARPLRLPSGNGYKFLSPGRFFPSSKC

SEQ ID NO: 97 - DNA, 3216 bp, Homo sapiens
  misc_feature: IL2RA isoform 1 precusor mRNA transcript
ggcagtttcctggctgaacacgccagcccaatacttaaagagagcaactcctgactccgatagagactggatggacccacaagggtgacagcccaggcggaccgatcttcccatcccacatcctccggcgcgatgccaaaaagaggctgacggcaactgggccttctgcagagaaagacctccgcttcactgccccggctggtcccaagggtcaggaagatggattcatacctgctgatgtggggactgctcacgttcatcatggtgcctggctgccaggcagagctctgtgacgatgacccgccagagatcccacacgccacattcaaagccatggcctacaaggaaggaaccatgttgaactgtgaatgcaagagaggtttccgcagaataaaaagcgggtcactctatatgctctgtacaggaaactctagccactcgtcctgggacaaccaatgtcaatgcacaagctctgccactcggaacacaacgaaacaagtgacacctcaacctgaagaacagaaagaaaggaaaaccacagaaatgcaaagtccaatgcagccagtggaccaagcgagccttccaggtcactgcagggaacctccaccatgggaaaatgaagccacagagagaatttatcatttcgtggtggggcagatggtttattatcagtgcgtccagggatacagggctctacacagaggtcctgctgagagcgtctgcaaaatgacccacgggaagacaaggtggacccagccccagctcatatgcacaggtgaaatggagaccagtcagtttccaggtgaagagaagcctcaggcaagccccgaaggccgtcctgagagtgagacttcctgcctcgtcacaacaacagattttcaaatacagacagaaatggctgcaaccatggagacgtccatatttacaacagagtaccaggtagcagtggccggctgtgttttcctgctgatcagcgtcctcctcctgagtgggctcacctggcagcggagacagaggaagagtagaagaacaatctagaaaaccaaaagaacaagaatttcttggtaagaagccgggaacagacaacagaagtcatgaagcccaagtgaaatcaaaggtgctaaatggtcgcccaggagacatccgttgtgcttgcctgcgttttggaagctctgaagtcacatcacaggacacggggcagtggcaaccttgtctctatgccagctcagtcccatcagagagcgagcgctacccacttctaaatagcaatttcgccgttgaagaggaagggcaaaaccactagaactctccatcttattttcatgtatatgtgttcattaaagcatgaatggtatggaactctctccaccctatatgtagtataaagaaaagtaggtttacattcatctcattccaacttcccagttcaggagtcccaaggaaagccccagcactaacgtaaatacacaacacacacactctaccctatacaactggacattgtctgcgtggttcctttctcagccgcttctgactgctgattctcccgttcacgttgcctaataaacatccttcaagaactctgggctgctacccagaaatcattttacccttggctcaatcctctaagctaacccccttctactgagccttcagtcttgaatttctaaaaaacagaggccatggcagaataatctttgggtaacttcaaaacggggcagccaaacccatgaggcaatgtcaggaacagaaggatgaatgaggtcccaggcagagaatcatacttagcaaagttttacctgtgcgttactaattggcctctttaagagttagtttctttgggattgctatgaatgataccctgaatttggcctgcactaatttgatgtttacaggtggacacacaaggtgcaaatcaatgcgtacgtttcctgagaagtgtctaaaaacaccaaaaagggatccgtacattcaatgtttatgcaaggaaggaaagaaagaaggaagtgaagagggagaagggatggaggtcacactggtagaacgtaaccacggaaaagagcgcatcaggcctggcacggtggctcaggcctataaccccagctccctaggagaccaaggcgggagcatctcttgaggccaggagtttgagaccagcctgggcagcatagcaagacacatccctacaaaaaattagaaattggctggatgtggtggcatacgcctgtagtcctagccactcaggaggctgaggcaggaggattgcttgagcccaggagttcgaggctgcagtcagtcatgatggcaccactgcactccagcctgggcaacagagcaagatcctgtctttaaggaaaaaaagacaagatgagcataccagcagtccttgaacattatcaaaaagttcagcatattagaatcaccgggaggccttgttaaaagagttcgctgggcccatcttcagagtctctgagttgttggtctggaatagagccaaatgttttgtgtgtctaacaattcccaggtgctgttgctgctgctactattccaggaacacactttgagaaccattgtgttattgctctgcacgcccacccactctcaactcccacgaaaaaaatcaacttccagagctaagatttcggtggaagtcctggttccatatctggtgcaagatctcccctcacgaatcagttgagtcaacattctagctcaacaacatcacacgattaacattaacgaaaattattcatttgggaaactatcagccagttttcacttctgaaggggcaggagagtgttatgagaaatcacggcagttttcagcagggtccagattcagattaaataactattttctgtcatttctgtgaccaaccacatacaaacagactcatctgtgcactctccccctcccccttcaggtatatgttttctgagtaaagttgaaaagaatctcagaccagaaaatatagatatatatttaaatcttacttgagtagaactgattacgacttttgggtgttgaggggtctataagatcaaaacttttccatgataatactaagatgttatcgaccatttatctgtccttctctcaaaagtgtatggtggaattttccagaagctatgtgatacgtgatgatgtcatcactctgctgttaacatataataaatttattgctattgtttataaaagaataaatgatatttttt

SEQ ID NO: 98 - DNA, 3000 bp, Homo sapiens
  misc_feature: IL2RA isoform 2 precusor mRNA transcript
ggcagtttcctggctgaacacgccagcccaatacttaaagagagcaactcctgactccgatagagactggatggacccacaagggtgacagcccaggcggaccgatcttcccatcccacatcctccggcgcgatgccaaaaagaggctgacggcaactgggccttctgcagagaaagacctccgcttcactgccccggctggtcccaagggtcaggaagatggattcatacctgctgatgtggggactgctcacgttcatcatggtgcctggctgccaggcagagctctgtgacgatgacccgccagagatcccacacgccacattcaaagccatggcctacaaggaaggaaccatgttgaactgtgaatgcaagagaggtttccgcagaataaaaagcgggtcactctatatgctctgtacaggaaactctagccactcgtcctgggacaaccaatgtcaatgcacaagctctgccactcggaacacaacgaaacaagtgacacctcaacctgaagaacagaaagaaaggaaaaccacagaaatgcaaagtccaatgcagccagtggaccaagcgagccttccaggtgaagagaagcctcaggcaagccccgaaggccgtcctgagagtgagacttcctgcctcgtcacaacaacagattttcaaatacagacagaaatggctgcaaccatggagacgtccatatttacaacagagtaccaggtagcagtggccggctgtgttttcctgctgatcagcgtcctcctcctgagtgggctcacctggcagcggagacagaggaagagtagaagaacaatctagaaaaccaaaagaacaagaatttcttggtaagaagccgggaacagacaacagaagtcatgaagcccaagtgaaatcaaaggtgctaaatggtcgcccaggagacatccgttgtgcttgcctgcgttttggaagctctgaagtcacatcacaggacacggggcagtggcaaccttgtctctatgccagctcagtcccatcagagagcgagcgctacccacttctaaatagcaatttcgccgttgaagaggaagggcaaaaccactagaactctccatcttattttcatgtatatgtgttcattaaagcatgaatggtatggaactctctccaccctatatgtagtataaagaaaagtaggtttacattcatctcattccaacttcccagttcaggagtcccaaggaaagccccagcactaacgtaaatacacaacacacacactctaccctatacaactggacattgtctgcgtggttcctttctcagccgcttctgactgctgattctcccgttcacgttgcctaataaacatccttcaagaactctgggctgctacccagaaatcattttacccttggctcaatcctctaagctaacccccttctactgagccttcagtcttgaatttctaaaaaacagaggccatggcagaataatctttgggtaacttcaaaacggggcagccaaacccatgaggcaatgtcaggaacagaaggatgaatgaggtcccaggcagagaatcatacttagcaaagttttacctgtgcgttactaattggcctctttaagagttagtttctttgggattgctatgaatgataccctgaatttggcctgcactaatttgatgtttacaggtggacacacaaggtgcaaatcaatgcgtacgtttcctgagaagtgtctaaaaacaccaaaaagggatccgtacattcaatgtttatgcaaggaaggaaagaaagaaggaagtgaagagggagaagggatggaggtcacactggtagaacgtaaccacggaaaagagcgcatcaggcctggcacggtggctcaggcctataaccccagctccctaggagaccaaggcgggagcatctcttgaggccaggagtttgagaccagcctgggcagcatagcaagacacatccctacaaaaaattagaaattggctggatgtggtggcatacgcctgtagtcctagccactcaggaggctgaggcaggaggattgcttgagcccaggagttcgaggctgcagtcagtcatgatggcaccactgcactccagcctgggcaacagagcaagatcctgtctttaaggaaaaaaagacaagatgagcataccagcagtccttgaacattatcaaaaagttcagcatattagaatcaccgggaggccttgttaaaagagttcgctgggcccatcttcagagtctctgagttgttggtctggaatagagccaaatgttttgtgtgtctaacaattcccaggtgctgttgctgctgctactattccaggaacacactttgagaaccattgtgttattgctctgcacgcccacccactctcaactcccacgaaaaaaatcaacttccagagctaagatttcggtggaagtcctggttccatatctggtgcaagatctcccctcacgaatcagttgagtcaacattctagctcaacaacatcacacgattaacattaacgaaaattattcatttgggaaactatcagccagttttcacttctgaaggggcaggagagtgttatgagaaatcacggcagttttcagcagggtccagattcagattaaataactattttctgtcatttctgtgaccaaccacatacaaacagactcatctgtgcactctccccctcccccttcaggtatatgttttctgagtaaagttgaaaagaatctcagaccagaaaatatagatatatatttaaatcttacttgagtagaactgattacgacttttgggtgttgaggggtctataagatcaaaacttttccatgataatactaagatgttatcgaccatttatctgtccttctctcaaaagtgtatggtggaattttccagaagctatgtgatacgtgatgatgtcatcactctgctgttaacatataataaatttattgctattgtttataaaagaataaatgatatttttt

SEQ ID NO: 99 - DNA, 2928 bp, Homo sapiens
  misc_feature: IL2RA isoform 3 precusor mRNA transcript
ggcagtttcctggctgaacacgccagcccaatacttaaagagagcaactcctgactccgatagagactggatggacccacaagggtgacagcccaggcggaccgatcttcccatcccacatcctccggcgcgatgccaaaaagaggctgacggcaactgggccttctgcagagaaagacctccgcttcactgccccggctggtcccaagggtcaggaagatggattcatacctgctgatgtggggactgctcacgttcatcatggtgcctggctgccaggcagagctctgtgacgatgacccgccagagatcccacacgccacattcaaagccatggcctacaaggaaggaaccatgttgaactgtgaatgcaagagaggtttccgcagaataaaaagcgggtcactctatatgctctgtacaggaaactctagccactcgtcctgggacaaccaatgtcaatgcacaagctctgccactcggaacacaacgaaacaagtgacacctcaacctgaagaacagaaagaaaggaaaaccacagaaatgcaaagtccaatgcagccagtggaccaagcgagccttccagattttcaaatacagacagaaatggctgcaaccatggagacgtccatatttacaacagagtaccaggtagcagtggccggctgtgttttcctgctgatcagcgtcctcctcctgagtgggctcacctggcagcggagacagaggaagagtagaagaacaatctagaaaaccaaaagaacaagaatttcttggtaagaagccgggaacagacaacagaagtcatgaagcccaagtgaaatcaaaggtgctaaatggtcgcccaggagacatccgttgtgcttgcctgcgttttggaagctctgaagtcacatcacaggacacggggcagtggcaaccttgtctctatgccagctcagtcccatcagagagcgagcgctacccacttctaaatagcaatttcgccgttgaagaggaagggcaaaaccactagaactctccatcttattttcatgtatatgtgttcattaaagcatgaatggtatggaactctctccaccctatatgtagtataaagaaaagtaggtttacattcatctcattccaacttcccagttcaggagtcccaaggaaagccccagcactaacgtaaatacacaacacacacactctaccctatacaactggacattgtctgcgtggttcctttctcagccgcttctgactgctgattctcccgttcacgttgcctaataaacatccttcaagaactctgggctgctacccagaaatcattttacccttggctcaatcctctaagctaacccccttctactgagccttcagtcttgaatttctaaaaaacagaggccatggcagaataatctttgggtaacttcaaaacggggcagccaaacccatgaggcaatgtcaggaacagaaggatgaatgaggtcccaggcagagaatcatacttagcaaagttttacctgtgcgttactaattggcctctttaagagttagtttctttgggattgctatgaatgataccctgaatttggcctgcactaatttgatgtttacaggtggacacacaaggtgcaaatcaatgcgtacgtttcctgagaagtgtctaaaaacaccaaaaagggatccgtacattcaatgtttatgcaaggaaggaaagaaagaaggaagtgaagagggagaagggatggaggtcacactggtagaacgtaaccacggaaaagagcgcatcaggcctggcacggtggctcaggcctataaccccagctccctaggagaccaaggcgggagcatctcttgaggccaggagtttgagaccagcctgggcagcatagcaagacacatccctacaaaaaattagaaattggctggatgtggtggcatacgcctgtagtcctagccactcaggaggctgaggcaggaggattgcttgagcccaggagttcgaggctgcagtcagtcatgatggcaccactgcactccagcctgggcaacagagcaagatcctgtctttaaggaaaaaaagacaagatgagcataccagcagtccttgaacattatcaaaaagttcagcatattagaatcaccgggaggccttgttaaaagagttcgctgggcccatcttcagagtctctgagttgttggtctggaatagagccaaatgttttgtgtgtctaacaattcccaggtgctgttgctgctgctactattccaggaacacactttgagaaccattgtgttattgctctgcacgcccacccactctcaactcccacgaaaaaaatcaacttccagagctaagatttcggtggaagtcctggttccatatctggtgcaagatctcccctcacgaatcagttgagtcaacattctagctcaacaacatcacacgattaacattaacgaaaattattcatttgggaaactatcagccagttttcacttctgaaggggcaggagagtgttatgagaaatcacggcagttttcagcagggtccagattcagattaaataactattttctgtcatttctgtgaccaaccacatacaaacagactcatctgtgcactctccccctcccccttcaggtatatgttttctgagtaaagttgaaaagaatctcagaccagaaaatatagatatatatttaaatcttacttgagtagaactgattacgacttttgggtgttgaggggtctataagatcaaaacttttccatgataatactaagatgttatcgaccatttatctgtccttctctcaaaagtgtatggtggaattttccagaagctatgtgatacgtgatgatgtcatcactctgctgttaacatataataaatttattgctattgtttataaaagaataaatgatatttttt

SEQ ID NO: 100 - DNA, 7650 bp, Homo sapiens
  misc_feature: ATP9A mRNA
ggcagcctgctggctcgctcatctttaaggtcctgatggacagaggctgtgttttcttagctctgtaccccagcacccaccaggacctgctctgtgggaacaagggaagaaggaaggtctgtggtggacgagtaatatgtgctgcgagtggctgagatgctgcggtggaggggaggccaggccccgcactgtctggctggggcaccccgagaagagagaccagaggtatcctcggaatgtcatcaacaatcagaagtacaatttcttcacctttcttcctggggtgctgttcaaccagttcaaatactttttcaacctctatttcttacttcttgcctgctctcagtttgttcccgaaatgagacttggtgcactctatacctactgggttcccctgggcttcgtgctggccgtcactgtcatccgtgaggcggtggaggagatccgatgctacgtgcgggacaaggaagtcaactcccaggtctacagccggctcacagcacgaggcacagtgaaggtgaagagttctaacatccaagttggagaccttatcatcgttgaaaagaaccagcgggtccctgccgacatgatcttcctgaggacatcagaaaaaaacgggtcatgcttcttgcggacggatcagctggatggggagacggactggaagctgcggcttcccgtggcctgcacgcagaggctccccacggccgccgaccttcttcagattcgatcgtatgtgtacgcagaagagccaaatattgacattcacaacttcgtgggaacttttacccgagaagacagcgaccccccgatcagcgagagcctgagcatagagaacacgctgtgggctggcactgtggtcgcatcaggtactgttgtgggtgttgttctttacactggcagagaactccggagtgtcatgaatacctcaaatccccgaagtaagatcggcctgttcgacttggaagtgaactgcctcaccaagatcctctttggtgccctggtggtggtctcgctggtcatggttgcccttcagcactttgcaggccgttggtacctgcagatcatccgcttcctcctcttgttttccaacatcatccccattagtttgcgtgtgaacctggacatgggcaagatcgtgtacagctgggtgattcgaagggactcgaaaatccccgggaccgtggttcgctccagcacgattcctgagcagctgggcaggatttcgtacttactcacagacaagacaggcactcttacccagaacgagatgattttcaaacggctccatctcggaacagtagcctacggcctcgactcaatggacgaagtacaaagccacattttcagcatttacacccagcaatcccaggacccaccggctcagaagggcccaacgctcaccactaaggtccggcggaccatgagcagccgcgtgcacgaagccgtgaaggccatcgcgctctgccacaacgtgactcccgtgtatgagtccaacggtgtgactgatcaggctgaggccgagaagcagtacgaagactcctgccgcgtataccaggcatccagccccgatgaggtggccctggtacagtggacggaaagtgtgggcttaaccctggtgggccgagaccagtcttccatgcagctgaggacccctggcgaccagatcctgaacttcaccatcctacagatcttccctttcacctatgaaagcaaacgtatgggcatcatcgtgcgggatgaatcaactggagaaattacgttttacatgaagggagcagatgtggtcatggctggcattgtgcagtacaatgactggttggaggaagagtgtggcaacatggcccgagaagggctgcgggtgctcgtggtggcaaagaagtctcttgcagaggagcagtatcaggactttgaagcccgctacgtccaggccaagctgagtgtgcacgaccgctccctcaaagtggccacggtgatcgagagcctggagatggagatggaactgctgtgcctgacgggcgtggaggaccagctgcaggcagatgtgcggcccacgctggagaccctgaggaatgctggcatcaaggtttggatgctgacaggggacaagctggagacagctacgtgcacagcgaagaatgcacatctggtgaccagaaaccaagacatccacgtttttcggctggtgaccaaccgcggggaggctcacctcgagctgaacgccttccgcaggaagcatgattgtgccctggtcatctcgggagactccctggaggtttgcctcaagtactatgagtacgagttcatggagctggcctgccagtgcccggccgtagtctgctgccgatgtgcccccacccagaaggcccagatcgtgcgcctgcttcaggagcgcacgggcaagctcacctgtgcagtaggggacggaggcaatgacgtcagcatgattcaggaatctgactgcggcgtgggagtggaaggaaaggaaggaaaacaggcttcgttggctgcagacttctccatcactcaatttaagcatcttggccggttgcttatggtgcatggccggaacagctacaagcggtcagccgccctcagccagttcgtgattcacaggagcctctgtatcagcaccatgcaggctgtcttttcctccgtgttttactttgcctccgtccctctctatcaaggattcctcatcattgggtactccacaatttacaccatgtttcctgtgttttctctggtcctggacaaagatgtcaaatcggaagttgccatgctgtatcctgagctctacaaggatcttctcaagggacggccgttgtcctacaagacattcttaatatgggttttgattagcatctatcaagggagcaccatcatgtacggggcgctgctgctgtttgagtcggagttcgtgcacatcgtggccatctccttcacctcgctgatcctcaccgagctgctcatggtggcgctgaccatccagacctggcactggctcatgacagtggcggagctgctcagcctggcctgctacatcgcctccctggtgttcttacacgagttcatcgatgtgtacttcatcgccaccttgtcattcttgtggaaagtctccgtcatcactctggtcagctgcctccccctctatgtcctcaagtacctgcgaagacggttctctccccccagctactcaaagctcacatcataggccgtgcgttcgctggagggggccctggtcttggcgcttccctgatggacagagctcaagttccatttatattaaccgccacctgtggattttgcagtaattgctaacacatgcagttttaatgggaagtggctctgcgcctaaacggagtcctaacgctgcatcaacgggagggagggtcctgaaagagacccatctgggcctgtctgaacccctcgttcttcatgtttaggtgaatatgaatatgttaaagctggtggctcagctgggagatttatatgggtcactgtgcgagcttccttatgacttgaattttgttgtcacatgataaaagtttctgtgtagctgaaggttgtagaaggcttgtgtgtgtgtgtgtgtgtgtgtgtgtgtgtgtgtgtgtttttaaagagtcctaatgtgtatgtactctttatgtctttcttgctcttacaaagaggtgtcagaaaaatagaaagctcttggtgtcggtttgggaggaaaagacagtgacatttggtaaaaagttatccacacaataatctccattcggaaatgctcagtatcgtctccagccagccctgcttatccaggttacactggattcctgggatcgtaaccagtaaatgagaggagagggagagagagtgtcctaagtccaatctgttatccttgatctgattcagcatccatagtgtgtgagttaacttcacctgccacctcgtaaaagaatttcagaggtgtgatcccgctttattgggacctggtaacaatcacaaagccagtggctgtttgagaaggacctcagacattttcagcagagttgttttagcaggaaacgtgccactgaatggcccctaaatgtgtcgacagtgtgataagagactcaactaattctttaggcaacatggcagatgtgactcagatcctccaagaccaaagcggaaaggtcagggggctgggactcttctcttccatagaagcctgtttcctgttaggaggcataatggaagatgaccccacaaaggcagaggcatctttcggaacaacactggtggcagctttcagaacaaggaacccctggtgggaggacgcccaagctacagcgttgggatctgggatctgttccactgccggcagatttcaaggggaacttgctgaaaggcagccagtggtgaagatttctcccctcccaggatggactacatgccggcatgtttcttataaagctgtggctgcttgtttcagaggaagggagtttgcagtcgcgggacgtggtagagcaaggcattcttgggttttcaagttgcttcttgcagaagccacatatgcatgccataagggttaagttggtggatctttaagagccaagtgtggttgagatcttggatttgcgtttacttcttgatgaatacatatccttcaaaccctctgcctggcgctacttctgtgtgcttcagagatgtacatcacagcctggtttctgatgcctactaactcctgctcttggagagctggagacacgaggatcagatagtcccttgcctttggagcactcttgataagcttttgtattttgtgttgtccttttaaaatgttctagaatgactttacgttgcaggtactggttaattggctgttgacaccacatctattttgtcttatgattctgcagttttgcagtacttttctctatctgattcagccatttctgccagagggaaaaggtcggcagaaaagatgtattgagtgaatagttaaggataggatctttgtccaaaaatttcagaaagattgagcaaatctgacgtattcattgagtgagtttctgtgttttcaaaggtggaggagaaatttgtgctggaagtttttaagcctccgttttcttggaaatcagtctgtaacactggcaagtcttaagatagtcccatttagactttgcagatgctgaacctggctctgtaacgctgggaagtcttaagatagtcctgtttagactttgcaaaccctgtacctggctttgctcggagattcgggatgctggctcctgcaggcagggcgtgtgggagcctcgtcagaaagttttagaggtttccagcagaagcagaatgaagatggtctccctggccttttccttaattctcaattttgattgaggtgcacaagttgacttttaaagccaacgcttaagatactgattgacatcttcaagggagaatgctcccaggaggggctgaagaagccatagttggaagtggaaggtactcgtcagtgttctccacaaacctttttactctgttgtctcagccgcactggggcggaggcggtcaagggtgagaagtaccgacactcaagtgcaaactgccacgtcgttggcccatcccatcagtgggcagctggctgacgccattcactggacggtccctgaacacctaggaatgcacacaccgtgcttctcagacactggagacgcaaaggcaggaggatgcagtccggtgagaggacacgatctttacctgcacaatcagactgtaagcccagcagagaaccccaggggcgcctgggtacttctcggaggtcatcttagttgtggtggggaagacaaagaaataagcaaacaagaaactagagttactatacaagaaactctcctgagtttgtaaaccttaagcataaggattcagttgacctttttcttggttcatcaatctggaaagaacttacataaagcgccattgacactgtcacctgggagctccatgggccgtaagtctttgacagccaatttaatttgaggtcagagggccttgaggtacacagtcagcactgtttgaacacttttcctgaaagcaaaactcacagctccctgcgccctctgacaacactagctatttctgccagagtaagaacttctattactattttattattgttcatatgtcttttgatgatggttgtgtgacagggggaagcaggatctatttggtttcttcccctccccccaccccttcctttttgtctctctttttttttctctaagaaaatcaccagactagtttttccatcttgagtaatttcttatgtgggacagttttgatcctcattttgaaagcatgcgtgtgcacatgtgtgttgcctgtggtgccaggtgagacaggtggcactaactccagctgcttggaaggcatcccaagggcgcatcttaaagttggagcagacctcccttttccagcccctggggccattagaccacgtgctggaactagcattgtaaaattcccatcccagttccactcccctgaagtgaaacccttttttttttgtgacagtaaatcttaaaaatcattgtctctttatgaacatttcctcagtttcttctctgctgaaaatgtaagccatgctactttttaatgtattttgaattttgtgctcattggaaattgatatgctaatgcctcccccaccccccgccagacttttctttttatactttgtcttgtttttactggggtaggctgggcatgcgtgcgtgcctttagggcagcattttaaacctttgccaaaattgcaaatgggacatgtacattcttctgctccatcctacttaaacacctatcagctatttttatctttaaccttttctgtatgtttgaagtgtgtggggggtgtgtgtgtgtgtgaaagagcgagagaatgatgtcatctaaagttttttgaagaattatttggttttcattgcattaaaattctatcactcccagctttgttttcatttaaaaaaatatacaaagagctttgtaaatacaacacattttatttctcccccttcttttaatgtacagcttttttgccacttatatatacttaaaatattcccatgaattatgtccagttcttcttggaaaaaaatttggttttgaatgaacctgcaaagcatcctgcagcgtgagcagctcctccacctggagctccgaagcatcttctcaggccaaagcggcattacccgtgaatctgtcttctccgccacagcatggtttgaggcgcagtctgttaatatagctgggccatgtcagtgactgttgtgtttgtggggtcaggtggggggcatggtatttgcaaaaaaaacaaattatggctaatttattattttgttgcagtggggttaactgtaaactcatgtaagagtctgtgatttcctcattggttgatctctctctctgtaatcctcattgcaaattttcaccaggacagcgttttttgattagaggggagctctggcacagtatgctttaatttagcaggaacttccagatgatttaaattctcgatgctgtgatgacacacatatgatctttcgtgtttctgagcgactctactttcattgtttgccagcgtggctcgttgctgttgcccaataaagcttgtgtacgttctgc

SEQ ID NO: 101 - DNA, 1074 bp, Homo sapiens
  misc_feature: HMX3 mRNA
atgccggaacccgggccggacgctgccggcaccgccagcgcacagccccaaccgccgccgccccccccacccgctcccaaggagtccccgttctccatcaagaacctgctcaacggagaccaccaccggccgccccctaagcctcagccgcccccacggacgctcttcgcgccagcctcggctgccgccgccgccgccgctgccgctgccgcggcggccaagggggccctggagggcgccgcgggcttcgcgctctcgcaggtgggcgacctggctttccctcgctttgagatcccggcgcagaggtttgccctgcccgcgcactacctggagcgctccccagcctggtggtacccctacaccctgacccccgccggcggccacctcccgcgacctgaagcctcggagaaggccttgctgagagactcctcccccgcctccggcacagaccgcgactctccggagccactgctcaaggccgaccccgatcacaaggagctggactccaagagcccggacgagatcattctggaggagagcgactccgaggaaagcaaaaaggaaggcgaagcggcgccaggcgcggccggggcgagcgtaggggcggcggcggccactccgggcgcagaagactggaagaagggcgctgaaagtccagagaagaagccggcgtgccgcaagaagaagacgcgcacagtcttctcgcgcagccaggtcttccagctcgagtccaccttcgacatgaagcgctatctgagcagctcggagcgagccggcctggccgcgtccctgcacctcaccgagacgcaggtcaagatctggttccagaaccgccgcaacaagtggaagcggcagctggcggcggagctggaggcggccaacctgagccatgccgcggcgcagcgcatcgtgcgggtgcccatcctctaccacgagaactcggcggccgagggcgcggcggctgcagccgcgggggccccggtgccagtcagccagccgctgctcaccttcccgcaccccgtctactactcgcacccggtggtctcttccgtgccgctgctacggccggtctga

SEQ ID NO: 102 - DNA, 5496 bp, Homo sapiens
  misc_feature: DPYSL3 isoform 1 mRNA
tgctccgcgcgctagctggctgtgtggctcgctggctcgctagggacaagcaggaatcggagcagcactgccgcctctggcgcgaaggctcaggcgcctcctcccgccacagtcactgtggctcggcgcacgctgccggcggctgccctttccgcctctggggaagaaaaacccgcgggccgctttcgtgcttgaaccatggcctcgggccggaggggctgggacagctcccacgaagacgatctgcccgtgtacctggccaggccgggcaccacggaccaggtcccgcggcagaaatacggcggcatgttctgcaacgtggagggcgccttcgagagcaagacgctggatttcgatgccctcagcgtggggcagcggggcgcgaagactcctcggagcggccagggcagcgaccgaggatcggggagtcggcccgggatcgagggggacaccccgcgcaggggccaaggccgggaagagagcagggagcccgcgcccgcctcccccgcccccgccggggtagagatccggagcgccaccggcaaagaggtgttgcagaacctcggccccaaggacaagagtgaccgtctccttatcaagggaggcagaatcgtcaatgatgatcagtccttttatgctgatatttacatggaagatggcttaataaaacaaattggagacaatctgattgttcctggaggagtgaagaccattgaagccaatgggaagatggtgatccctggaggcatcgatgtccatactcacttccagatgccatataagggaatgaccacagtagatgacttcttccaagggacaaaggcggccttagcaggtggcaccaccatgatcattgaccatgtggtgcctgagcctgagtccagcctgactgaggcctatgagaaatggagagagtgggctgatgggaagagttgctgtgactatgccctgcatgtggacatcacccactggaatgacagcgtcaagcaggaagtgcagaacctcatcaaggacaaaggggttaactccttcatggtttatatggcttataaggatttgtatcaagtatctaacacagagctctatgagatcttcacctgcctgggagagctgggggccattgctcaagttcatgctgagaatggggatatcattgcccaggagcaaacccgcatgttggaaatggggataactggcccagaaggccatgtactgagcaggccagaagagctggaagctgaggctgtgttccgtgccatcaccattgccagccaaaccaattgccctctctacgtcacaaaggtcatgagcaagagtgcagctgacctcatctcacaagccaggaaaaaaggaaatgtagtctttggtgagcccatcactgccagcctcggcatagatggaacccattattggagcaagaactgggccaaggcggctgcatttgtgacatccccacccctgagccctgacccaactactccggactacatcaactccttgctggccagcggggatctgcagctatctgggagtgcccactgcaccttcagcactgcccagaaagcaattgggaaggacaacttcacagccattcctgagggcaccaatggtgtggaggagcggatgtctgtcatctgggacaaggctgtggccacagggaaaatggacgaaaaccagttcgtggctgtgacaagcacaaacgctgccaagatcttcaacctgtatccccgcaagggaagaatatctgtgggttctgacagcgacctcgtcatctgggatccagatgctgtgaagatcgtctctgccaagaaccaccagtctgcggcagagtacaacatctttgaagggatggagctgcgcggggctcctctggttgtcatctgccagggcaagatcatgctggaagatggcaacctgcacgtgacccagggggctggccgcttcataccctgcagcccgttctccgactatgtctacaagcgcattaaagcacggaggaagatggcagacctgcatgccgtcccaaggggcatgtacgatgggcctgtgtttgacctgaccaccacccccaaaggtggcacccccgcaggctctgctcggggctctcctactcggccgaacccacctgtgaggaatcttcatcagtcgggatttagcctgtcaggcacccaagtggatgagggggttcgctcagccagcaagcgcatcgtggcgcccccaggcggccgttctaatatcacatctctgagttaagcaagccttcctcaaagagaggggcagaagcaagaagagattgttttgaagccaaaatggtacaccgatatttaagaaggaaagcgaatccaaacggttgtgatctaaagaatcaataagcctcaagccttatgtttctccaatgttacgctcgcttgcctagctttacgaatattgctttgttttctgtttatgcatagccttgatttgtttgactcccctccccccatttacatgcatgcaatcagacaggccactaaggtaaaagagtctgctctatcatagtgttgagagcgtgtgtagtgctgcatcttatgacaaggggacagacaagctgggacgtcagggaaatgaacaaaagggacgcaggttatttggggtgagtgggtggtgggagcctggagcaaggtggagggtgcagaggggctggggtagggcatgtaggagggaggtgggtgggtcaggtgagtggaaggggtgttgtatattgtgttgatgacgtacgttatttccatggaagatagccgctgtggcagctgtcacatcaccacagctccctagggtctgccgagaaggcaggcagtctttgggttctgttctttgtcacgtcccctacaagtaaattttgtttctttgaacgtttattaaaatgccaagacccaaccatttcttccacctgcttgattgtgccagtgtttgctcaggcctctttcttagtgttgctttcaaatccttctctttcctgggttgggaaggccaggcagggacagagcaaatgacacttctcttcctcttgccctccctgcctctttggtgctcttaaaagccagcagctgagaacatagcacaggcccacgtggtgagggcacccacagcttaaagacgcttccttctaaacacggcgaggtcacctctcactcttctgtctttgcaaaccgagaagagtggcatgcttctggcatcccaagtcaggattttagctcagatgaggcagaatgaagggcctctcttacaggcagtttgtgtttgattctctcgatcctggcacatccatgataaataggagtttttgaaagttggttttattaggtgttccctaatttttaccgtaataggtcatctcagcttatatgaaagtcaagtggggaactgggaaagccaaagtcagtcttgagcagagggagcacattttgtggacctggttccacctttccattccaaaccacctgtttccccttccattagcagaaactctgggggaactttgtgtctcagtcctagaatctccccaagtgagtggaagtgacatgatgcagtcttcctcatggggcacctgaaagaaattagtgtgggtgcttcgatctaccttgtctgtcagagttgaatatctctttccctatcatgctgcttctgaaaattcagttttggagcaagtcctgtgagcaagataagaatctatagaaccaagatgctcattttcagaagaaatatgttcaacctgggatcagacttccatgctctggggaatccaagtggtagcacctgtaaccctgtgtactaagtgctttgaagagaagagcaggcctcagacaccttttaattgcttaggagaaaccattgtctctgactgcaggtttgaataagttgaagaccagagaaaagtacacactgggctacaaaggaatttggagatagccaaggaacaggatttcccctagcaagctaccttctgttcaaatcatgaaaaaagactatttccccttagaatagggaagcttgctattttaaagctcttgtagtgcttttcttttaagggagatgtagtaaaagggaaaatgtagctcttagtttacacttcaaagatgtgggggtctttcagagaactaagaataacagttttatgtgcagagagagtttgccagatctgaagcatatacctcattgactaggctgttactttgggataggttgcagtaccagccacagccagcagatagaggaaaagacacacataaactcgcttctgagcgtccacttctgcactctctgctctgctgttactcagcccctgagtctgactcatctctgcacaacctctctgtgccatgaagataagtcttccatggccaaatcggtcatccgcactgcccttgggacttccgaagtgaaccattccaccagaacctttgattctgcacaagatttccttgctctgggaacaacccccaaatgcccttgggaggaacaacatgagctcaggaagcctctctttcttcacttaccattactaactctccaagcatagaaatccctgggaattgcgagaataactcccactattttaaaatttatattcagatttgtttcgtttcataagacacatcaaacaggcctatacaaaaggtttaggaaaagaaaacaatggtgagtcccggccctcttcgaattcactggcacctcatgcaagtgtaggaaggcacgctggatcgtctatctgattccaaagctgtcctttgccatctcatcccttggcctgccccccaaccctgaggatgcccctgccatccccccaacctcctcatattgcctctgaacccagatggcaatccatcccggttctctctgagggccacgggcttgggtagtggaaagggtgtttgggaaattgttaaatcagttacccgtagtagagctatttcttgtacttctaagttttctagaagtggaaggattgtagtcatcctgaaaatgggtttacttcaaaatccctcagccttgttcttcacgactgtctatactgagagtgtcatgtttccacaaagggctgacacctgagcctggattttcactcatccctgagaagccctttccagtagggtgggcaattcccaacttccttgccacaagcttcccaggctttctcccctggaaaactccagcttgagtcccagatacactcatgggctgccctgggcagccagcattcattgtaagttccctctttgaaaactggtgtgtgggtgttcagttctgtgtctggtgggtatggacagacagtaatctcctgtgatctgtgctagctgtgaggcagctctggaacgtgaagagctgtttggtttgaaccgtgaacaaaactgtgttttgagtttagctgacattaaagaaaaaagttcatcacgtgactgttaatgtaaacctggttattaaaataactatgaaattaccaaaaaaaaaaaaaaaaaa

SEQ ID NO: 103 - DNA, 5066 bp, Homo sapiens
  misc_feature: DPYSL3 isoform 2 mRNA
gcaccattcactccacctgatctcggggcgctgtgcgctgaggaaggcgcgggcgagccggagcagaagaaggagggagggagccagccgctgcagccaccaccgccaccatgtcctaccaaggcaagaagaacatcccgcggatcacgagtgaccgtctccttatcaagggaggcagaatcgtcaatgatgatcagtccttttatgctgatatttacatggaagatggcttaataaaacaaattggagacaatctgattgttcctggaggagtgaagaccattgaagccaatgggaagatggtgatccctggaggcatcgatgtccatactcacttccagatgccatataagggaatgaccacagtagatgacttcttccaagggacaaaggcggccttagcaggtggcaccaccatgatcattgaccatgtggtgcctgagcctgagtccagcctgactgaggcctatgagaaatggagagagtgggctgatgggaagagttgctgtgactatgccctgcatgtggacatcacccactggaatgacagcgtcaagcaggaagtgcagaacctcatcaaggacaaaggggttaactccttcatggtttatatggcttataaggatttgtatcaagtatctaacacagagctctatgagatcttcacctgcctgggagagctgggggccattgctcaagttcatgctgagaatggggatatcattgcccaggagcaaacccgcatgttggaaatggggataactggcccagaaggccatgtactgagcaggccagaagagctggaagctgaggctgtgttccgtgccatcaccattgccagccaaaccaattgccctctctacgtcacaaaggtcatgagcaagagtgcagctgacctcatctcacaagccaggaaaaaaggaaatgtagtctttggtgagcccatcactgccagcctcggcatagatggaacccattattggagcaagaactgggccaaggcggctgcatttgtgacatccccacccctgagccctgacccaactactccggactacatcaactccttgctggccagcggggatctgcagctatctgggagtgcccactgcaccttcagcactgcccagaaagcaattgggaaggacaacttcacagccattcctgagggcaccaatggtgtggaggagcggatgtctgtcatctgggacaaggctgtggccacagggaaaatggacgaaaaccagttcgtggctgtgacaagcacaaacgctgccaagatcttcaacctgtatccccgcaagggaagaatatctgtgggttctgacagcgacctcgtcatctgggatccagatgctgtgaagatcgtctctgccaagaaccaccagtctgcggcagagtacaacatctttgaagggatggagctgcgcggggctcctctggttgtcatctgccagggcaagatcatgctggaagatggcaacctgcacgtgacccagggggctggccgcttcataccctgcagcccgttctccgactatgtctacaagcgcattaaagcacggaggaagatggcagacctgcatgccgtcccaaggggcatgtacgatgggcctgtgtttgacctgaccaccacccccaaaggtggcacccccgcaggctctgctcggggctctcctactcggccgaacccacctgtgaggaatcttcatcagtcgggatttagcctgtcaggcacccaagtggatgagggggttcgctcagccagcaagcgcatcgtggcgcccccaggcggccgttctaatatcacatctctgagttaagcaagccttcctcaaagagaggggcagaagcaagaagagattgttttgaagccaaaatggtacaccgatatttaagaaggaaagcgaatccaaacggttgtgatctaaagaatcaataagcctcaagccttatgtttctccaatgttacgctcgcttgcctagctttacgaatattgctttgttttctgtttatgcatagccttgatttgtttgactcccctccccccatttacatgcatgcaatcagacaggccactaaggtaaaagagtctgctctatcatagtgttgagagcgtgtgtagtgctgcatcttatgacaaggggacagacaagctgggacgtcagggaaatgaacaaaagggacgcaggttatttggggtgagtgggtggtgggagcctggagcaaggtggagggtgcagaggggctggggtagggcatgtaggagggaggtgggtgggtcaggtgagtggaaggggtgttgtatattgtgttgatgacgtacgttatttccatggaagatagccgctgtggcagctgtcacatcaccacagctccctagggtctgccgagaaggcaggcagtctttgggttctgttctttgtcacgtcccctacaagtaaattttgtttctttgaacgtttattaaaatgccaagacccaaccatttcttccacctgcttgattgtgccagtgtttgctcaggcctctttcttagtgttgctttcaaatccttctctttcctgggttgggaaggccaggcagggacagagcaaatgacacttctcttcctcttgccctccctgcctctttggtgctcttaaaagccagcagctgagaacatagcacaggcccacgtggtgagggcacccacagcttaaagacgcttccttctaaacacggcgaggtcacctctcactcttctgtctttgcaaaccgagaagagtggcatgcttctggcatcccaagtcaggattttagctcagatgaggcagaatgaagggcctctcttacaggcagtttgtgtttgattctctcgatcctggcacatccatgataaataggagtttttgaaagttggttttattaggtgttccctaatttttaccgtaataggtcatctcagcttatatgaaagtcaagtggggaactgggaaagccaaagtcagtcttgagcagagggagcacattttgtggacctggttccacctttccattccaaaccacctgtttccccttccattagcagaaactctgggggaactttgtgtctcagtcctagaatctccccaagtgagtggaagtgacatgatgcagtcttcctcatggggcacctgaaagaaattagtgtgggtgcttcgatctaccttgtctgtcagagttgaatatctctttccctatcatgctgcttctgaaaattcagttttggagcaagtcctgtgagcaagataagaatctatagaaccaagatgctcattttcagaagaaatatgttcaacctgggatcagacttccatgctctggggaatccaagtggtagcacctgtaaccctgtgtactaagtgctttgaagagaagagcaggcctcagacaccttttaattgcttaggagaaaccattgtctctgactgcaggtttgaataagttgaagaccagagaaaagtacacactgggctacaaaggaatttggagatagccaaggaacaggatttcccctagcaagctaccttctgttcaaatcatgaaaaaagactatttccccttagaatagggaagcttgctattttaaagctcttgtagtgcttttcttttaagggagatgtagtaaaagggaaaatgtagctcttagtttacacttcaaagatgtgggggtctttcagagaactaagaataacagttttatgtgcagagagagtttgccagatctgaagcatatacctcattgactaggctgttactttgggataggttgcagtaccagccacagccagcagatagaggaaaagacacacataaactcgcttctgagcgtccacttctgcactctctgctctgctgttactcagcccctgagtctgactcatctctgcacaacctctctgtgccatgaagataagtcttccatggccaaatcggtcatccgcactgcccttgggacttccgaagtgaaccattccaccagaacctttgattctgcacaagatttccttgctctgggaacaacccccaaatgcccttgggaggaacaacatgagctcaggaagcctctctttcttcacttaccattactaactctccaagcatagaaatccctgggaattgcgagaataactcccactattttaaaatttatattcagatttgtttcgtttcataagacacatcaaacaggcctatacaaaaggtttaggaaaagaaaacaatggtgagtcccggccctcttcgaattcactggcacctcatgcaagtgtaggaaggcacgctggatcgtctatctgattccaaagctgtcctttgccatctcatcccttggcctgccccccaaccctgaggatgcccctgccatccccccaacctcctcatattgcctctgaacccagatggcaatccatcccggttctctctgagggccacgggcttgggtagtggaaagggtgtttgggaaattgttaaatcagttacccgtagtagagctatttcttgtacttctaagttttctagaagtggaaggattgtagtcatcctgaaaatgggtttacttcaaaatccctcagccttgttcttcacgactgtctatactgagagtgtcatgtttccacaaagggctgacacctgagcctggattttcactcatccctgagaagccctttccagtagggtgggcaattcccaacttccttgccacaagcttcccaggctttctcccctggaaaactccagcttgagtcccagatacactcatgggctgccctgggcagccagcattcattgtaagttccctctttgaaaactggtgtgtgggtgttcagttctgtgtctggtgggtatggacagacagtaatctcctgtgatctgtgctagctgtgaggcagctctggaacgtgaagagctgtttggtttgaaccgtgaacaaaactgtgttttgagtttagctgacattaaagaaaaaagttcatcacgtgactgttaatgtaaacctggttattaaaataactatgaaattaccaaaaaaaaaaaaaaaaaa

SEQ ID NO: 104 - DNA, 2547 bp, Homo sapiens
  misc_feature: ZNF415 isoform 1 mRNA
gcgcatgcgcagtttcctacaggcccggaaacggatcgcgttgggtgaaggtgacggcgtcgagcgtgagtgaccctctgtgtagattaaacctgcgctccctgtttcccatttccacagccgatgtccagggtcgatacggcccttaaaatccccgtacactccaccccaggtgggagacaatgccttggagctgcaaatcttctctgagtctgaagcatcctgcctgacgcgtttgctcacattgacccgtgccttccctcagtccttctcatctctactgagattccgtctcaccctgaccctgtgacatgaacttctgaagagtccactgggcatggtcctgggaagggctcacacccagacatggatggagacgggttgacattcagggacgtggccatcgaattctctcaagatgagtggaaatgcctgaactctacacagaggactttatacagggatgtgatgttggagaactacaggaacctggtctccctggatctgtctcgtaactgtgtaatcaaggaactagcaccacaacaggaaggtaacccaggagaagtattccacacagtgacattggaacaacatgaaaaacatgacattgaagagttttgcttcagggaaatcaagaaaaaaatacacgactttgactgtcagtggagagatgatgaaagaaattgcaacaaagtgactacggccccaaaagaaaatcttacttgtaggagagaccaacgcgatagaagaggtataggaaacaagtctattaaacatcagcttggattaagctttctaccacatccccatgaactgcagcagtttcaagctgaagggaaaatttatgaatgtaaccatgttgagaagtctgtcaaccatggttcctcagtttcaccaccccaaataatttcttctaccatcaaaacccatgtttctaataaatatgggactgatttcatctgttcttcattactcacacaagaacagaaatcatgcattagggaaaaaccttacagatatattgagtgcgacaaagccttgaatcatggctcacacatgactgtacgtcaggtaagtcattctggagagaaaggatataaatgtgatctgtgtggcaaggtctttagtcaaaaatcaaaccttgcgcgtcattggagagttcatactggagagaaaccatacaaatgtaatgaatgtgacagaagtttcagtcgcaactcatgccttgcactacatcggagagttcacactggagagaaaccttacaaatgttatgagtgtgacaaggtcttcagtcgaaattcatgccttgcactacatcagaaaactcatattggagagaaaccttacacatgtaaagagtgtggcaaagcctttagtgtgaggtcaacacttaccaaccatcaggtaattcatagtggcaagaaaccttacaaatgcaatgaatgtggcaaggtgttcagtcagacttcaagccttgcaactcatcagagaattcacactggggagaaaccatacaagtgtaatgaatgtggtaaagtcttcagtcagacttcaagccttgcaaggcattggagaattcatactggagagaaaccttacaaatgcaatgaatgtggtaaggttttcagttacaattcacaccttgcgagtcatcggagagttcatactggagagaaaccttacaagtgtaatgagtgtgggaaagcctttagtgtgcattcgaacttaactacccatcaggtcatccatactggagagaagccttacaaatgtaatcaatgtggcaaaggcttcagtgtgcattcaagcctaactacccatcaggtcatccatactggagaaaaaccttacaaatgtaatgagtgtggcaaatcctttagtgtgcgcccaaacctcactagacatcagataatccatactggaaagaaaccttacaaatgtagtgattgtgggaagtcctttagtgtgcgcccaaacctcttcagacatcaaattatccatactaaggagaaaccttataaaagaaattaatatggcaaggtcttcagtcaaagtttaaatcctgtgagtcatcaaagaatttatatcagagagaaaccatacaagtataataaatgtggcaaggttttcagtcacaattcactcctacacagcatcagagaatttcattcttgagagaatccttacgagtacagcaaacccttcatcacaagttcaagcattcattgacatcagagtccatgctaaagagaaatcatatacacctaactgtgtggcagaggcttcatttaggtctcacaactcactagacatcaaaatgtgtaaacatctttgtatattttgtgcatgttgaagctattaaccaaggatcaaaactgtaacacatccaaggatttatgtgaggaataattcagtctagttgtgctgataaacttttcatattacacattgtagaacaaatgcaagcccaaatatgttaaaactcacacaacatgatatatattaaaggttgcaggatgtttgaagtcaaaaaaaaaaaaaaaa

SEQ ID NO: 105 - DNA, 2420 bp, Homo sapiens
  misc_feature: ZNF415 isoform 2 mRNA
gcgcatgcgcagtttcctacaggcccggaaacggatcgcgttgggtgaaggtgacggcgtcgagcgtgagtgaccctctgtgtagattaaacctgcgctccctgtttcccatttccacagccgatgtccagggtcgatacggcccttaaaatccccgtacactccaccccagcattgacttccaaagactcctggcacatgaggaagaaacccagaagaggagagcaaaggagtcaggaatggcttttactcagttgacattcagggacgtggccatcgaattctctcaagatgagtggaaatgcctgaactctacacagaggactttatacagggatgtgatgttggagaactacaggaacctggtctccctggatctgtctcgtaactgtgtaatcaaggaactagcaccacaacaggaaggtaacccaggagaagtattccacacagtgacattggaacaacatgaaaaacatgacattgaagagttttgcttcagggaaatcaagaaaaaaatacacgactttgactgtcagtggagagatgatgaaagaaattgcaacaaagtgactacggccccaaaagaaaatcttacttgtaggagagaccaacgcgatagaagaggtataggaaacaagtctattaaacatcagcttggattaagctttctaccacatccccatgaactgcagcagtttcaagctgaagggaaaatttatgaatgtaaccatgttgagaagtctgtcaaccatggttcctcagtttcaccaccccaaataatttcttctaccatcaaaacccatgtttctaataaatatgggactgatttcatctgttcttcattactcacacaagaacagaaatcatgcattagggaaaaaccttacagatatattgagtgcgacaaagccttgaatcatggctcacacatgactgtacgtcaggtaagtcattctggagagaaaggatataaatgtgatctgtgtggcaaggtctttagtcaaaaatcaaaccttgcgcgtcattggagagttcatactggagagaaaccatacaaatgtaatgaatgtgacagaagtttcagtcgcaactcatgccttgcactacatcggagagttcacactggagagaaaccttacaaatgttatgagtgtgacaaggtcttcagtcgaaattcatgccttgcactacatcagaaaactcatattggagagaaaccttacacatgtaaagagtgtggcaaagcctttagtgtgaggtcaacacttaccaaccatcaggtaattcatagtggcaagaaaccttacaaatgcaatgaatgtggcaaggtgttcagtcagacttcaagccttgcaactcatcagagaattcacactggggagaaaccatacaagtgtaatgaatgtggtaaagtcttcagtcagacttcaagccttgcaaggcattggagaattcatactggagagaaaccttacaaatgcaatgaatgtggtaaggttttcagttacaattcacaccttgcgagtcatcggagagttcatactggagagaaaccttacaagtgtaatgagtgtgggaaagcctttagtgtgcattcgaacttaactacccatcaggtcatccatactggagagaagccttacaaatgtaatcaatgtggcaaaggcttcagtgtgcattcaagcctaactacccatcaggtcatccatactggagaaaaaccttacaaatgtaatgagtgtggcaaatcctttagtgtgcgcccaaacctcactagacatcagataatccatactggaaagaaaccttacaaatgtagtgattgtgggaagtcctttagtgtgcgcccaaacctcttcagacatcaaattatccatactaaggagaaaccttataaaagaaattaatatggcaaggtcttcagtcaaagtttaaatcctgtgagtcatcaaagaatttatatcagagagaaaccatacaagtataataaatgtggcaaggttttcagtcacaattcactcctacacagcatcagagaatttcattcttgagagaatccttacgagtacagcaaacccttcatcacaagttcaagcattcattgacatcagagtccatgctaaagagaaatcatatacacctaactgtgtggcagaggcttcatttaggtctcacaactcactagacatcaaaatgtgtaaacatctttgtatattttgtgcatgttgaagctattaaccaaggatcaaaactgtaacacatccaaggatttatgtgaggaataattcagtctagttgtgctgataaacttttcatattacacattgtagaacaaatgcaagcccaaatatgttaaaactcacacaacatgatatatattaaaggttgcaggatgtttgaagtcaaaaaaaaaaaaaaaa

SEQ ID NO: 106 - DNA, 2676 bp, Homo sapiens
  misc_feature: ZNF415 isoform 3 mRNA
gcgcatgcgcagtttcctacaggcccggaaacggatcgcgttgggtgaaggtgacggcgtcgagcgacctctctgacctcatctcctgcctgtgtcctcctcgctccctctgctccagccaagcatgcgtccttcctgttcctgggccgagcttgctcctgcctcaaggccttcacgtgggctgtgcctctgctggaactcgctggcccctcagctgcagcattgacttccaaagactcctggcacatgaggaagaaacccagaagaggagagcaaaggagtcaggaatggcttttactcagttgacattcagggacgtggccatcgaattctctcaagatgagtggaaatgcctgaactctacacagaggactttatacagggatgtgatgttggagaactacaggaacctggtctccctggagtattatcctatgtgggagcacaggaaagagccctggaccatagaaagccaagtacgagtagcaagaaaaccaaaagggtgggaatggatcaaaggtgtgaaaacaggctggagtgcaatggtgcaatctcggctcactgcaaccttcgcctcccggattcaaatgattctcctgcctcagcctcccgagtagctgggattacagatctgtctcgtaactgtgtaatcaaggaactagcaccacaacaggaaggtaacccaggagaagtattccacacagtgacattggaacaacatgaaaaacatgacattgaagagttttgcttcagggaaatcaagaaaaaaatacacgactttgactgtcagtggagagatgatgaaagaaattgcaacaaagtgactacggccccaaaagaaaatcttacttgtaggagagaccaacgcgatagaagaggtataggaaacaagtctattaaacatcagcttggattaagctttctaccacatccccatgaactgcagcagtttcaagctgaagggaaaatttatgaatgtaaccatgttgagaagtctgtcaaccatggttcctcagtttcaccaccccaaataatttcttctaccatcaaaacccatgtttctaataaatatgggactgatttcatctgttcttcattactcacacaagaacagaaatcatgcattagggaaaaaccttacagatatattgagtgcgacaaagccttgaatcatggctcacacatgactgtacgtcaggtaagtcattctggagagaaaggatataaatgtgatctgtgtggcaaggtctttagtcaaaaatcaaaccttgcgcgtcattggagagttcatactggagagaaaccatacaaatgtaatgaatgtgacagaagtttcagtcgcaactcatgccttgcactacatcggagagttcacactggagagaaaccttacaaatgttatgagtgtgacaaggtcttcagtcgaaattcatgccttgcactacatcagaaaactcatattggagagaaaccttacacatgtaaagagtgtggcaaagcctttagtgtgaggtcaacacttaccaaccatcaggtaattcatagtggcaagaaaccttacaaatgcaatgaatgtggcaaggtgttcagtcagacttcaagccttgcaactcatcagagaattcacactggggagaaaccatacaagtgtaatgaatgtggtaaagtcttcagtcagacttcaagccttgcaaggcattggagaattcatactggagagaaaccttacaaatgcaatgaatgtggtaaggttttcagttacaattcacaccttgcgagtcatcggagagttcatactggagagaaaccttacaagtgtaatgagtgtgggaaagcctttagtgtgcattcgaacttaactacccatcaggtcatccatactggagagaagccttacaaatgtaatcaatgtggcaaaggcttcagtgtgcattcaagcctaactacccatcaggtcatccatactggagaaaaaccttacaaatgtaatgagtgtggcaaatcctttagtgtgcgcccaaacctcactagacatcagataatccatactggaaagaaaccttacaaatgtagtgattgtgggaagtcctttagtgtgcgcccaaacctcttcagacatcaaattatccatactaaggagaaaccttataaaagaaattaatatggcaaggtcttcagtcaaagtttaaatcctgtgagtcatcaaagaatttatatcagagagaaaccatacaagtataataaatgtggcaaggttttcagtcacaattcactcctacacagcatcagagaatttcattcttgagagaatccttacgagtacagcaaacccttcatcacaagttcaagcattcattgacatcagagtccatgctaaagagaaatcatatacacctaactgtgtggcagaggcttcatttaggtctcacaactcactagacatcaaaatgtgtaaacatctttgtatattttgtgcatgttgaagctattaaccaaggatcaaaactgtaacacatccaaggatttatgtgaggaataattcagtctagttgtgctgataaacttttcatattacacattgtagaacaaatgcaagcccaaatatgttaaaactcacacaacatgatatatattaaaggttgcaggatgtttgaagtcaaaaaaaaaaaaaaaaaa

SEQ ID NO: 107 - DNA, 2192 bp, Homo sapiens
  misc_feature: ZNF415 isoform 4 mRNA
gcgcatgcgcagtttcctacaggcccggaaacggatcgcgttgggtgaaggtgacggcgtcgagccattgacttccaaagactcctggcacatgaggaagaaacccagaagaggagagcaaaggagtcaggaatggcttttactcagatctgtctcgtaactgtgtaatcaaggaactagcaccacaacaggaaggtaacccaggagaagtattccacacagtgacattggaacaacatgaaaaacatgacattgaagagttttgcttcagggaaatcaagaaaaaaatacacgactttgactgtcagtggagagatgatgaaagaaattgcaacaaagtgactacggccccaaaagaaaatcttacttgtaggagagaccaacgcgatagaagaggtataggaaacaagtctattaaacatcagcttggattaagctttctaccacatccccatgaactgcagcagtttcaagctgaagggaaaatttatgaatgtaaccatgttgagaagtctgtcaaccatggttcctcagtttcaccaccccaaataatttcttctaccatcaaaacccatgtttctaataaatatgggactgatttcatctgttcttcattactcacacaagaacagaaatcatgcattagggaaaaaccttacagatatattgagtgcgacaaagccttgaatcatggctcacacatgactgtacgtcaggtaagtcattctggagagaaaggatataaatgtgatctgtgtggcaaggtctttagtcaaaaatcaaaccttgcgcgtcattggagagttcatactggagagaaaccatacaaatgtaatgaatgtgacagaagtttcagtcgcaactcatgccttgcactacatcggagagttcacactggagagaaaccttacaaatgttatgagtgtgacaaggtcttcagtcgaaattcatgccttgcactacatcagaaaactcatattggagagaaaccttacacatgtaaagagtgtggcaaagcctttagtgtgaggtcaacacttaccaaccatcaggtaattcatagtggcaagaaaccttacaaatgcaatgaatgtggcaaggtgttcagtcagacttcaagccttgcaactcatcagagaattcacactggggagaaaccatacaagtgtaatgaatgtggtaaagtcttcagtcagacttcaagccttgcaaggcattggagaattcatactggagagaaaccttacaaatgcaatgaatgtggtaaggttttcagttacaattcacaccttgcgagtcatcggagagttcatactggagagaaaccttacaagtgtaatgagtgtgggaaagcctttagtgtgcattcgaacttaactacccatcaggtcatccatactggagagaagccttacaaatgtaatcaatgtggcaaaggcttcagtgtgcattcaagcctaactacccatcaggtcatccatactggagaaaaaccttacaaatgtaatgagtgtggcaaatcctttagtgtgcgcccaaacctcactagacatcagataatccatactggaaagaaaccttacaaatgtagtgattgtgggaagtcctttagtgtgcgcccaaacctcttcagacatcaaattatccatactaaggagaaaccttataaaagaaattaatatggcaaggtcttcagtcaaagtttaaatcctgtgagtcatcaaagaatttatatcagagagaaaccatacaagtataataaatgtggcaaggttttcagtcacaattcactcctacacagcatcagagaatttcattcttgagagaatccttacgagtacagcaaacccttcatcacaagttcaagcattcattgacatcagagtccatgctaaagagaaatcatatacacctaactgtgtggcagaggcttcatttaggtctcacaactcactagacatcaaaatgtgtaaacatctttgtatattttgtgcatgttgaagctattaaccaaggatcaaaactgtaacacatccaaggatttatgtgaggaataattcagtctagttgtgctgataaacttttcatattacacattgtagaacaaatgcaagcccaaatatgttaaaactcacacaacatgatatatattaaaggttgcaggatgtttgaagtcaaaaaaaaaaaaaaaa

SEQ ID NO: 108 - DNA, 2673 bp, Homo sapiens
  misc_feature: ZNF415 isoform 5 mRNA
gcgcatgcgcagtttcctacaggcccggaaacggatcgcgttgggtgaaggtgacggcgtcgagcgtgggagacaatgccttggagctgcaaatcttctctgagtctgaagcatcctgcctgacgcgtttgctcacattgacccgtgccttccctcagtccttctcatctctactgagattccgtctcaccctgaccctgtgacatgaacttctgaagagtccactgggcatggtcctgggaagggctcacacccagacatggatggagacgggttgacattcagggacgtggccatcgaattctctcaagatgagtggaaatgcctgaactctacacagaggactttatacagggatgtgatgttggagaactacaggaacctggtctccctggagtattatcctatgtgggagcacaggaaagagccctggaccatagaaagccaagtacgagtagcaagaaaaccaaaagggtgggaatggatcaaaggtgtgaaaacagatggagtttcgctcttattgcccaggctggagtgcaatggtgcaatctcggctcactgcaaccttcgcctcccggattcaaatgattctcctgcctcagcctcccgagtagctgggattacagatctgtctcgtaactgtgtaatcaaggaactagcaccacaacaggaaggtaacccaggagaagtattccacacagtgacattggaacaacatgaaaaacatgacattgaagagttttgcttcagggaaatcaagaaaaaaatacacgactttgactgtcagtggagagatgatgaaagaaattgcaacaaagtgactacggccccaaaagaaaatcttacttgtaggagagaccaacgcgatagaagaggtataggaaacaagtctattaaacatcagcttggattaagctttctaccacatccccatgaactgcagcagtttcaagctgaagggaaaatttatgaatgtaaccatgttgagaagtctgtcaaccatggttcctcagtttcaccaccccaaataatttcttctaccatcaaaacccatgtttctaataaatatgggactgatttcatctgttcttcattactcacacaagaacagaaatcatgcattagggaaaaaccttacagatatattgagtgcgacaaagccttgaatcatggctcacacatgactgtacgtcaggtaagtcattctggagagaaaggatataaatgtgatctgtgtggcaaggtctttagtcaaaaatcaaaccttgcgcgtcattggagagttcatactggagagaaaccatacaaatgtaatgaatgtgacagaagtttcagtcgcaactcatgccttgcactacatcggagagttcacactggagagaaaccttacaaatgttatgagtgtgacaaggtcttcagtcgaaattcatgccttgcactacatcagaaaactcatattggagagaaaccttacacatgtaaagagtgtggcaaagcctttagtgtgaggtcaacacttaccaaccatcaggtaattcatagtggcaagaaaccttacaaatgcaatgaatgtggcaaggtgttcagtcagacttcaagccttgcaactcatcagagaattcacactggggagaaaccatacaagtgtaatgaatgtggtaaagtcttcagtcagacttcaagccttgcaaggcattggagaattcatactggagagaaaccttacaaatgcaatgaatgtggtaaggttttcagttacaattcacaccttgcgagtcatcggagagttcatactggagagaaaccttacaagtgtaatgagtgtgggaaagcctttagtgtgcattcgaacttaactacccatcaggtcatccatactggagagaagccttacaaatgtaatcaatgtggcaaaggcttcagtgtgcattcaagcctaactacccatcaggtcatccatactggagaaaaaccttacaaatgtaatgagtgtggcaaatcctttagtgtgcgcccaaacctcactagacatcagataatccatactggaaagaaaccttacaaatgtagtgattgtgggaagtcctttagtgtgcgcccaaacctcttcagacatcaaattatccatactaaggagaaaccttataaaagaaattaatatggcaaggtcttcagtcaaagtttaaatcctgtgagtcatcaaagaatttatatcagagagaaaccatacaagtataataaatgtggcaaggttttcagtcacaattcactcctacacagcatcagagaatttcattcttgagagaatccttacgagtacagcaaacccttcatcacaagttcaagcattcattgacatcagagtccatgctaaagagaaatcatatacacctaactgtgtggcagaggcttcatttaggtctcacaactcactagacatcaaaatgtgtaaacatctttgtatattttgtgcatgttgaagctattaaccaaggatcaaaactgtaacacatccaaggatttatgtgaggaataattcagtctagttgtgctgataaacttttcatattacacattgtagaacaaatgcaagcccaaatatgttaaaactcacacaacatgatatatattaaaggttgcaggatgtttgaagtcaaaaaaaaaaaaaaaaaa

SEQ ID NO: 109 - DNA, 2379 bp, Homo sapiens
  misc_feature: ZNF415 isoform 6 mRNA
taattcagccacatctcctccttctcactcaactcagacctctcaggataacttggtgaaatgactccctctctcagcctcagtgagcccacctgtaacagagataagggactagaccagaaaacctcaatcattgacttccaaagactcctggcacatgaggaagaaacccagaagaggagagcaaaggagtcaggaatggcttttactcagttgacattcagggacgtggccatcgaattctctcaagatgagtggaaatgcctgaactctacacagaggactttatacagggatgtgatgttggagaactacaggaacctggtctccctggatctgtctcgtaactgtgtaatcaaggaactagcaccacaacaggaaggtaacccaggagaagtattccacacagtgacattggaacaacatgaaaaacatgacattgaagagttttgcttcagggaaatcaagaaaaaaatacacgactttgactgtcagtggagagatgatgaaagaaattgcaacaaagtgactacggccccaaaagaaaatcttacttgtaggagagaccaacgcgatagaagaggtataggaaacaagtctattaaacatcagcttggattaagctttctaccacatccccatgaactgcagcagtttcaagctgaagggaaaatttatgaatgtaaccatgttgagaagtctgtcaaccatggttcctcagtttcaccaccccaaataatttcttctaccatcaaaacccatgtttctaataaatatgggactgatttcatctgttcttcattactcacacaagaacagaaatcatgcattagggaaaaaccttacagatatattgagtgcgacaaagccttgaatcatggctcacacatgactgtacgtcaggtaagtcattctggagagaaaggatataaatgtgatctgtgtggcaaggtctttagtcaaaaatcaaaccttgcgcgtcattggagagttcatactggagagaaaccatacaaatgtaatgaatgtgacagaagtttcagtcgcaactcatgccttgcactacatcggagagttcacactggagagaaaccttacaaatgttatgagtgtgacaaggtcttcagtcgaaattcatgccttgcactacatcagaaaactcatattggagagaaaccttacacatgtaaagagtgtggcaaagcctttagtgtgaggtcaacacttaccaaccatcaggtaattcatagtggcaagaaaccttacaaatgcaatgaatgtggcaaggtgttcagtcagacttcaagccttgcaactcatcagagaattcacactggggagaaaccatacaagtgtaatgaatgtggtaaagtcttcagtcagacttcaagccttgcaaggcattggagaattcatactggagagaaaccttacaaatgcaatgaatgtggtaaggttttcagttacaattcacaccttgcgagtcatcggagagttcatactggagagaaaccttacaagtgtaatgagtgtgggaaagcctttagtgtgcattcgaacttaactacccatcaggtcatccatactggagagaagccttacaaatgtaatcaatgtggcaaaggcttcagtgtgcattcaagcctaactacccatcaggtcatccatactggagaaaaaccttacaaatgtaatgagtgtggcaaatcctttagtgtgcgcccaaacctcactagacatcagataatccatactggaaagaaaccttacaaatgtagtgattgtgggaagtcctttagtgtgcgcccaaacctcttcagacatcaaattatccatactaaggagaaaccttataaaagaaattaatatggcaaggtcttcagtcaaagtttaaatcctgtgagtcatcaaagaatttatatcagagagaaaccatacaagtataataaatgtggcaaggttttcagtcacaattcactcctacacagcatcagagaatttcattcttgagagaatccttacgagtacagcaaacccttcatcacaagttcaagcattcattgacatcagagtccatgctaaagagaaatcatatacacctaactgtgtggcagaggcttcatttaggtctcacaactcactagacatcaaaatgtgtaaacatctttgtatattttgtgcatgttgaagctattaaccaaggatcaaaactgtaacacatccaaggatttatgtgaggaataattcagtctagttgtgctgataaacttttcatattacacattgtagaacaaatgcaagcccaaatatgttaaaactcacacaacatgatatatattaaaggttgcaggatgtttgaagtcaaaaaaaaaaaaaaaa

SEQ ID NO: 110 - DNA, 2659 bp, Homo sapiens
  misc_feature: ZNF415 isoform 7 mRNA
gcgcatgcgcagtttcctacaggcccggaaacggatcgcgttgggtgaaggtgacggcgtcgagcgtgagtgaccctctgtgtagattaaacctgcgctccctgtttcccatttccacagccgatgtccagggtcgatacggcccttaaaatccccgtacactccaccccagaaaggtgggagacaatgccttggagctgcaaatcttctctgagtctgaagcatcctgcctgacgcgtttgctcacattgacccgtgccttccctcagtccttctcatctctactgagattccgtctcaccctgaccctgtgacatgaacttctgaagagtccactgggcatggtcctgggaagggctcacacccagacatggatggagacgggttgacattcagggacgtggccatcgaattctctcaagatgagtggaaatgcctgaactctacacagaggactttatacagggatgtgatgttggagaactacaggaacctggtctccctggagtattatcctatgtgggagcacaggaaagagccctggaccatagaaagccaagtacgagtagcaagaaaaccaaaagggtgggaatggatcaaaggtgtgaaaacagatctgtctcgtaactgtgtaatcaaggaactagcaccacaacaggaaggtaacccaggagaagtattccacacagtgacattggaacaacatgaaaaacatgacattgaagagttttgcttcagggaaatcaagaaaaaaatacacgactttgactgtcagtggagagatgatgaaagaaattgcaacaaagtgactacggccccaaaagaaaatcttacttgtaggagagaccaacgcgatagaagaggtataggaaacaagtctattaaacatcagcttggattaagctttctaccacatccccatgaactgcagcagtttcaagctgaagggaaaatttatgaatgtaaccatgttgagaagtctgtcaaccatggttcctcagtttcaccaccccaaataatttcttctaccatcaaaacccatgtttctaataaatatgggactgatttcatctgttcttcattactcacacaagaacagaaatcatgcattagggaaaaaccttacagatatattgagtgcgacaaagccttgaatcatggctcacacatgactgtacgtcaggtaagtcattctggagagaaaggatataaatgtgatctgtgtggcaaggtctttagtcaaaaatcaaaccttgcgcgtcattggagagttcatactggagagaaaccatacaaatgtaatgaatgtgacagaagtttcagtcgcaactcatgccttgcactacatcggagagttcacactggagagaaaccttacaaatgttatgagtgtgacaaggtcttcagtcgaaattcatgccttgcactacatcagaaaactcatattggagagaaaccttacacatgtaaagagtgtggcaaagcctttagtgtgaggtcaacacttaccaaccatcaggtaattcatagtggcaagaaaccttacaaatgcaatgaatgtggcaaggtgttcagtcagacttcaagccttgcaactcatcagagaattcacactggggagaaaccatacaagtgtaatgaatgtggtaaagtcttcagtcagacttcaagccttgcaaggcattggagaattcatactggagagaaaccttacaaatgcaatgaatgtggtaaggttttcagttacaattcacaccttgcgagtcatcggagagttcatactggagagaaaccttacaagtgtaatgagtgtgggaaagcctttagtgtgcattcgaacttaactacccatcaggtcatccatactggagagaagccttacaaatgtaatcaatgtggcaaaggcttcagtgtgcattcaagcctaactacccatcaggtcatccatactggagaaaaaccttacaaatgtaatgagtgtggcaaatcctttagtgtgcgcccaaacctcactagacatcagataatccatactggaaagaaaccttacaaatgtagtgattgtgggaagtcctttagtgtgcgcccaaacctcttcagacatcaaattatccatactaaggagaaaccttataaaagaaattaatatggcaaggtcttcagtcaaagtttaaatcctgtgagtcatcaaagaatttatatcagagagaaaccatacaagtataataaatgtggcaaggttttcagtcacaattcactcctacacagcatcagagaatttcattcttgagagaatccttacgagtacagcaaacccttcatcacaagttcaagcattcattgacatcagagtccatgctaaagagaaatcatatacacctaactgtgtggcagaggcttcatttaggtctcacaactcactagacatcaaaatgtgtaaacatctttgtatattttgtgcatgttgaagctattaaccaaggatcaaaactgtaacacatccaaggatttatgtgaggaataattcagtctagttgtgctgataaacttttcatattacacattgtagaacaaatgcaagcccaaatatgttaaaactcacacaacatgatatatattaaaggttgcaggatgtttgaagtcaaaaaaaaaaaaaaaa

SEQ ID NO: 111 - DNA, 2518 bp, Homo sapiens
  misc_feature: ZNF415 isoform 8 mRNA
gcgcatgcgcagtttcctacaggcccggaaacggatcgcgttgggtgaaggtgacggcgtcgagcgtgagtgaccctctgtgtagattaaacctgcgctccctgtttcccatttccacagccgatgtccagggtcgatacggcccttaaaatccccgtacactccaccccagcattgacttccaaagactcctggcacatgaggaagaaacccagaagaggagagcaaaggagtcaggaatggcttttactcagttgacattcagggacgtggccatcgaattctctcaagatgagtggaaatgcctgaactctacacagaggactttatacagggatgtgatgttggagaactacaggaacctggtctccctgggctggagtgcaatggtgcaatctcggctcactgcaaccttcgcctcccggattcaaatgattctcctgcctcagcctcccgagtagctgggattacagatctgtctcgtaactgtgtaatcaaggaactagcaccacaacaggaaggtaacccaggagaagtattccacacagtgacattggaacaacatgaaaaacatgacattgaagagttttgcttcagggaaatcaagaaaaaaatacacgactttgactgtcagtggagagatgatgaaagaaattgcaacaaagtgactacggccccaaaagaaaatcttacttgtaggagagaccaacgcgatagaagaggtataggaaacaagtctattaaacatcagcttggattaagctttctaccacatccccatgaactgcagcagtttcaagctgaagggaaaatttatgaatgtaaccatgttgagaagtctgtcaaccatggttcctcagtttcaccaccccaaataatttcttctaccatcaaaacccatgtttctaataaatatgggactgatttcatctgttcttcattactcacacaagaacagaaatcatgcattagggaaaaaccttacagatatattgagtgcgacaaagccttgaatcatggctcacacatgactgtacgtcaggtaagtcattctggagagaaaggatataaatgtgatctgtgtggcaaggtctttagtcaaaaatcaaaccttgcgcgtcattggagagttcatactggagagaaaccatacaaatgtaatgaatgtgacagaagtttcagtcgcaactcatgccttgcactacatcggagagttcacactggagagaaaccttacaaatgttatgagtgtgacaaggtcttcagtcgaaattcatgccttgcactacatcagaaaactcatattggagagaaaccttacacatgtaaagagtgtggcaaagcctttagtgtgaggtcaacacttaccaaccatcaggtaattcatagtggcaagaaaccttacaaatgcaatgaatgtggcaaggtgttcagtcagacttcaagccttgcaactcatcagagaattcacactggggagaaaccatacaagtgtaatgaatgtggtaaagtcttcagtcagacttcaagccttgcaaggcattggagaattcatactggagagaaaccttacaaatgcaatgaatgtggtaaggttttcagttacaattcacaccttgcgagtcatcggagagttcatactggagagaaaccttacaagtgtaatgagtgtgggaaagcctttagtgtgcattcgaacttaactacccatcaggtcatccatactggagagaagccttacaaatgtaatcaatgtggcaaaggcttcagtgtgcattcaagcctaactacccatcaggtcatccatactggagaaaaaccttacaaatgtaatgagtgtggcaaatcctttagtgtgcgcccaaacctcactagacatcagataatccatactggaaagaaaccttacaaatgtagtgattgtgggaagtcctttagtgtgcgcccaaacctcttcagacatcaaattatccatactaaggagaaaccttataaaagaaattaatatggcaaggtcttcagtcaaagtttaaatcctgtgagtcatcaaagaatttatatcagagagaaaccatacaagtataataaatgtggcaaggttttcagtcacaattcactcctacacagcatcagagaatttcattcttgagagaatccttacgagtacagcaaacccttcatcacaagttcaagcattcattgacatcagagtccatgctaaagagaaatcatatacacctaactgtgtggcagaggcttcatttaggtctcacaactcactagacatcaaaatgtgtaaacatctttgtatattttgtgcatgttgaagctattaaccaaggatcaaaactgtaacacatccaaggatttatgtgaggaataattcagtctagttgtgctgataaacttttcatattacacattgtagaacaaatgcaagcccaaatatgttaaaactcacacaacatgatatatattaaaggttgcaggatgtttgaagtcaaaaaaaaaaaaaaaa

SEQ ID NO: 112 - DNA, 2534 bp, Homo sapiens
  misc_feature: ZNF415 isoform 9 mRNA
gcgcatgcgcagtttcctacaggcccggaaacggatcgcgttgggtgaaggtgacggcgtcgagccattgacttccaaagactcctggcacatgaggaagaaacccagaagaggagagcaaaggagtcaggaatggcttttactcagttgacattcagggacgtggccatcgaattctctcaagatgagtggaaatgcctgaactctacacagaggactttatacagggatgtgatgttggagaactacaggaacctggtctccctggatccatctgtgatagcctctcttcttatccaagcaaagggctgagattcttgaaaagccacagcacatcatgttccattcattttataagcgggaaattctcttcctgaccagagtattatcctatgtgggagcacaggaaagagccctggaccatagaaagccaagtacgagtagcaagaaaaccaaaagggtgggaatggatcaaaggtgtgaaaacagatctgtctcgtaactgtgtaatcaaggaactagcaccacaacaggaaggtaacccaggagaagtattccacacagtgacattggaacaacatgaaaaacatgacattgaagagttttgcttcagggaaatcaagaaaaaaatacacgactttgactgtcagtggagagatgatgaaagaaattgcaacaaagtgactacggccccaaaagaaaatcttacttgtaggagagaccaacgcgatagaagaggtataggaaacaagtctattaaacatcagcttggattaagctttctaccacatccccatgaactgcagcagtttcaagctgaagggaaaatttatgaatgtaaccatgttgagaagtctgtcaaccatggttcctcagtttcaccaccccaaataatttcttctaccatcaaaacccatgtttctaataaatatgggactgatttcatctgttcttcattactcacacaagaacagaaatcatgcattagggaaaaaccttacagatatattgagtgcgacaaagccttgaatcatggctcacacatgactgtacgtcaggtaagtcattctggagagaaaggatataaatgtgatctgtgtggcaaggtctttagtcaaaaatcaaaccttgcgcgtcattggagagttcatactggagagaaaccatacaaatgtaatgaatgtgacagaagtttcagtcgcaactcatgccttgcactacatcggagagttcacactggagagaaaccttacaaatgttatgagtgtgacaaggtcttcagtcgaaattcatgccttgcactacatcagaaaactcatattggagagaaaccttacacatgtaaagagtgtggcaaagcctttagtgtgaggtcaacacttaccaaccatcaggtaattcatagtggcaagaaaccttacaaatgcaatgaatgtggcaaggtgttcagtcagacttcaagccttgcaactcatcagagaattcacactggggagaaaccatacaagtgtaatgaatgtggtaaagtcttcagtcagacttcaagccttgcaaggcattggagaattcatactggagagaaaccttacaaatgcaatgaatgtggtaaggttttcagttacaattcacaccttgcgagtcatcggagagttcatactggagagaaaccttacaagtgtaatgagtgtgggaaagcctttagtgtgcattcgaacttaactacccatcaggtcatccatactggagagaagccttacaaatgtaatcaatgtggcaaaggcttcagtgtgcattcaagcctaactacccatcaggtcatccatactggagaaaaaccttacaaatgtaatgagtgtggcaaatcctttagtgtgcgcccaaacctcactagacatcagataatccatactggaaagaaaccttacaaatgtagtgattgtgggaagtcctttagtgtgcgcccaaacctcttcagacatcaaattatccatactaaggagaaaccttataaaagaaattaatatggcaaggtcttcagtcaaagtttaaatcctgtgagtcatcaaagaatttatatcagagagaaaccatacaagtataataaatgtggcaaggttttcagtcacaattcactcctacacagcatcagagaatttcattcttgagagaatccttacgagtacagcaaacccttcatcacaagttcaagcattcattgacatcagagtccatgctaaagagaaatcatatacacctaactgtgtggcagaggcttcatttaggtctcacaactcactagacatcaaaatgtgtaaacatctttgtatattttgtgcatgttgaagctattaaccaaggatcaaaactgtaacacatccaaggatttatgtgaggaataattcagtctagttgtgctgataaacttttcatattacacattgtagaacaaatgcaagcccaaatatgttaaaactcacacaacatgatatatattaaaggttgcaggatgtttgaagtcaaaaaaaaaaaaaaaa

SEQ ID NO: 113 - DNA, 2078 bp, Homo sapiens
  misc_feature: IRX5 isoform 1 mRNA
atgtcctatccgcagggctacttgtaccagccgtccgcctcgctggcgctctactcgtgcccggcgtacagcaccagcgtcatttcggggccccgcacggatgagctcggccgctcttcttcgggctccgcgttctcgccctacgctggctcgactgccttcacggcgccctcgccgggctacaactcgcacctccagtacggcgccgaccccgcggccgccgccgccgccgccttctcctcgtacgtgggctctccctacgaccacacacccggcatggcgggctccttggggtaccatccttacgcggcgcccctgggatcgtacccttacggggacccagcgtaccggaagaacgccacaagggacgccacggctaccctcaaggcctggctcaacgagcaccgcaagaacccctaccccaccaagggcgagaagatcatgctggccatcatcaccaagatgaccctcacccaggtgtccacctggttcgccaacgcgcgccggcgcctcaagaaagagaataaaatgacgtggacgccgcggaaccgcagcgaggacgaggaagaggaggagaacattgacctggagaagaacgacgaggacgagccccagaagcccgaggacaagggcgaccccgagggccccgaagcaggaggagctgagcagaaggcggcttcgggctgcgaacggcttcagggaccacccacccctgcaggcaaggagacggagggcagcctcagcgactcggattttaaggagccgccctcggagggccgcctcgacgcgctgcagggccccccccgcaccggcgggccctccccggctgggccagcggcggcgcggctggcggaggacccggcccctcactaccccgccggagcgccggcgcccggcccgcatccagccgcgggcgaggtgcctccgggtcccggcgggccctcggttatccattcgccgcctccgccgccgcctcctgcggtgctcgccaagcccaaactgtggtctttggcagagatcgccacatcgtcggacaaggtcaaggacgggggcggcgggaacgagggctctccatgcccaccgtgtcccgggcccatagccgggcaagccctaggaggcagccgggcgtcgccggccccggcgccgtcacgctcgccctcggcgcagtgtccttttccaggcgggacggtgctgtcccggcctctctactacaccgcgcccttctatcccggctacacgaactatggctccttcggacaccttcatggccacccggggcccgggccaggccccacaaccggtccggggtctcatttcaatggattaaaccagaccgtgttgaaccgagcggacgctttggctaaagacccgaaaatgttgcggagccagtctcagctagacctgtgcaaagactctccctatgaattgaagaaaggtatgtccgacatttaacgcgggctgcgtcggtcccggacttttctaatttattaaaaacatggccttggcagttatttttccatcaccgagagagagagacagagagagaaaataaactacccctcctattcagaagtttatagtttatggagatggatgacataaaaatgtaaacatctccacacaaaaaaaaaaatgtcttaaccaaccgaaaagaaaaattaaaaaaggatttgtattaaatcttattctgtatatttaatgtagcatttttgtatttaaattgataattcaatatctttgaagtaaattatgaaatcaagacacctgtacaggcatttaatgtttttttgtaatataaatatatacatttgtgtttcccccaaaactgtttcatagttaaaaaatacaagtttaatttaattttttacacctattgattctgctgggtatgagctaaagtattacagaaaggaaacaggttatactcttagatttaaaaagtgaaagaaactgcaggcgcctttgtaaaatgcaaaatatttaattaaaagagattttaacataatgagagccactcattactttttagaagcctcaataaactgtccattgccttggtcaaaaaaaaaaaaaaaaaa

SEQ ID NO: 114 - DNA, 2075 bp, Homo sapiens
  misc_feature: IRX5 isoform 2 mRNA
atgtcctatccgcagggctacttgtaccagccgtccgcctcgctggcgctctactcgtgcccggcgtacagcaccagcgtcatttcggggccccgcacggatgagctcggccgctcttcttcgggctccgcgttctcgccctacgctggctcgactgccttcacggcgccctcgccgggctacaactcgcacctccagtacggcgccgaccccgcggccgccgccgccgccgccttctcctcgtacgtgggctctccctacgaccacacacccggcatggcgggctccttggggtaccatccttacgcggcgcccctgggatcgtacccttacggggacccagcgtaccggaagaacgccacaagggacgccacggctaccctcaaggcctggctcaacgagcaccgcaagaacccctaccccaccaagggcgagaagatcatgctggccatcatcaccaagatgaccctcacccaggtgtccacctggttcgccaacgcgcgccggcgcctcaagaaagagaataaaatgacgtggacgccgcggaaccgcagcgaggacgaggaagaggaggagaacattgacctggagaagaacgacgaggacgagccccagaagcccgaggacaagggcgaccccgagggccccgaagcaggagctgagcagaaggcggcttcgggctgcgaacggcttcagggaccacccacccctgcaggcaaggagacggagggcagcctcagcgactcggattttaaggagccgccctcggagggccgcctcgacgcgctgcagggccccccccgcaccggcgggccctccccggctgggccagcggcggcgcggctggcggaggacccggcccctcactaccccgccggagcgccggcgcccggcccgcatccagccgcgggcgaggtgcctccgggtcccggcgggccctcggttatccattcgccgcctccgccgccgcctcctgcggtgctcgccaagcccaaactgtggtctttggcagagatcgccacatcgtcggacaaggtcaaggacgggggcggcgggaacgagggctctccatgcccaccgtgtcccgggcccatagccgggcaagccctaggaggcagccgggcgtcgccggccccggcgccgtcacgctcgccctcggcgcagtgtccttttccaggcgggacggtgctgtcccggcctctctactacaccgcgcccttctatcccggctacacgaactatggctccttcggacaccttcatggccacccggggcccgggccaggccccacaaccggtccggggtctcatttcaatggattaaaccagaccgtgttgaaccgagcggacgctttggctaaagacccgaaaatgttgcggagccagtctcagctagacctgtgcaaagactctccctatgaattgaagaaaggtatgtccgacatttaacgcgggctgcgtcggtcccggacttttctaatttattaaaaacatggccttggcagttatttttccatcaccgagagagagagacagagagagaaaataaactacccctcctattcagaagtttatagtttatggagatggatgacataaaaatgtaaacatctccacacaaaaaaaaaaatgtcttaaccaaccgaaaagaaaaattaaaaaaggatttgtattaaatcttattctgtatatttaatgtagcatttttgtatttaaattgataattcaatatctttgaagtaaattatgaaatcaagacacctgtacaggcatttaatgtttttttgtaatataaatatatacatttgtgtttcccccaaaactgtttcatagttaaaaaatacaagtttaatttaattttttacacctattgattctgctgggtatgagctaaagtattacagaaaggaaacaggttatactcttagatttaaaaagtgaaagaaactgcaggcgcctttgtaaaatgcaaaatatttaattaaaagagattttaacataatgagagccactcattactttttagaagcctcaataaactgtccattgccttggtcaaaaaaaaaaaaaaaaaa

SEQ ID NO: 115 - DNA, 3946 bp, Homo sapiens
  misc_feature: TMPRSS15 mRNA
ttcttaaattagcaagccttcaaaaccaaaaatggggtcgaaaagaggcatatcttctaggcatcattctctcagctcctatgaaatcatgtttgcagctctctttgccatattggtagtgctctgtgctggattaattgcagtatcctgcctgacaatcaaggaatcccaacgaggtgcagcacttggacagagtcatgaagccagagcgacatttaaaataacatccggagttacatataatcctaatttgcaagacaaactctcagtggatttcaaagttcttgcttttgaccttcagcaaatgatagatgagatctttctatcaagcaatctgaagaatgaatataagaactcaagagttttacaatttgaaaatggcagcattatagtcgtatttgaccttttctttgcccagtgggtgtcagatgaaaatgtaaaagaagaactgattcaaggccttgaagcaaataaatccagccaactggtcactttccatattgatttgaacagcgttgatatcctagacaagctaacaaccaccagtcatctggcaactccaggaaatgtctcaatagagtgcctgcctggttcaagtccttgtactgatgctctaacgtgtataaaagctgatttattttgtgatggagaagtaaactgtccagatggttctgacgaagacaataaaatgtgtgccacagtttgtgatggaagatttttgttaactggatcatctgggtctttccaggctactcattatccaaaaccttctgaaacaagtgttgtctgccagtggatcatacgtgtaaaccaaggactttccattaaactgagcttcgatgattttaatacatattatacagatatattagatatttatgaaggtgtaggatcaagcaagattttaagagcttctatttgggaaactaatcctggcacaataagaattttttccaaccaagttactgccacctttcttatagaatctgatgaaagtgattatgttggctttaatgcaacatatactgcatttaacagcagtgagcttaataattatgagaaaattaattgtaactttgaggatggcttttgtttctgggtccaggatctaaatgatgataatgaatgggaaaggattcagggaagcaccttttctccttttactggacccaattttgaccacacttttggcaatgcttcaggattttacatttctaccccaactggaccaggagggagacaagaacgagtggggcttttaagcctccctttggaccccactttggagccagcttgccttagtttctggtatcatatgtatggtgaaaatgtccataaattaagcattaatatcagcaatgaccaaaatatggagaagacagttttccaaaaggaaggaaattatggagacaattggaattatggacaagtaaccctaaatgaaacagttaaatttaaggttgcttttaatgcttttaaaaacaagatcctgagtgatattgcgttggatgacattagcctaacatatgggatttgcaatgggagtctttatccagaaccaactttggtgccaactcctccaccagaacttcctacggactgtggaggaccttttgagctgtgggagccaaatacaacattcagttctacgaactttccaaacagctaccctaatctggctttctgtgtttggattttaaatgcacaaaaaggaaagaatatacaacttcattttcaagaatttgacttagaaaatattaacgatgtagttgaaataagagatggtgaagaagctgattccttgctcttagctgtgtacacagggcctggcccagtaaaggatgtgttctctaccaccaacagaatgactgtgcttctcatcactaacgatgtgttggcaagaggagggtttaaagcaaactttactactggctatcacttggggattccagagccatgcaaggcagaccattttcaatgtaaaaatggagagtgtgttccactggtgaatctctgtgacggtcatctgcactgtgaggatggctcagatgaagcagattgtgtgcgttttttcaatggcacaacgaacaacaatggtttagtgcggttcagaatccagagcatatggcatacagcttgtgctgagaactggaccacccagatttcaaatgatgtttgtcaactgctgggactagggagtggaaactcatcaaagccaatcttctctaccgatggtggaccatttgtcaaattaaacacagcacctgatggccacttaatactaacacccagtcaacagtgtttacaggattccttgattcggttacagtgtaaccataaatcttgtggaaaaaaactggcagctcaagacatcaccccaaagattgttggaggaagtaatgccaaagaaggggcctggccctgggttgtgggtctgtattatggcggccgactgctctgcggcgcatctctcgtcagcagtgactggctggtgtccgccgcacactgcgtgtatgggagaaacttagagccatccaagtggacagcaatcctaggcctgcatatgaaatcaaatctgacctctcctcaaacagtccctcgattaatagatgaaattgtcataaaccctcattacaataggcgaagaaaggacaacgacattgccatgatgcatctggaatttaaagtgaattacacagattacatacaacctatttgtttaccggaagaaaatcaagtttttcctccaggaagaaattgttctattgctggttgggggacggttgtatatcaaggtactactgcaaacatattgcaagaagctgatgttcctcttctatcaaatgagagatgccaacagcagatgccagaatataacattactgaaaatatgatatgtgcaggctatgaagaaggaggaatagattcttgtcagggggattcaggaggaccattaatgtgccaagaaaacaacaggtggttccttgctggtgtgacctcatttggatacaagtgtgccctgcctaatcgccccggagtgtatgccagggtctcaaggtttaccgaatggatacaaagttttctacattagcgcatttcttaaactaaacaggaaagtcgcattattttcccattctactctagaaagcatggaaattaagtgtttcgtacaaaaattttaaaaagttaccaaaggtttttattcttacctatgtcaatgaaatgctagggggccagggaaacaaaattttaaaaataataaaattcaccatagcaatacagaataactttaaaataccattaaatacatttgtatttcattgtgaacaggtatttcttcacagatctcatttttaaaattcttaatgattatttttattacttactgttgtttaaagggatgttattttaaagcatataccatacacttaagaaatttgagcagaatttaaaaaagaaagaaaataaattgtttttcccaaagtatgtcactgttggaaataaactgccataaattttctagttccagtttagtttgctgctattagcagaaactcaattgtttctctgtcttttctatcaaaattttcaacatatgcataaccttagtattttcccaaccaatagaaactatttattgtaagcttatgtcacaggcctggactaaattgattttacgttcctcttaaataagttaattaaataaaagataaattaactgatatagtcattgtatattagataaattttacctatttatttcaagcaagtatttttaagtctcaagaaaataatcagacataccaaagaaatgcacctattgcaaatcctggtcttggtttatgtgtgttacagtggatatttctaatatatgaaaacttatttagacacagctgaatcacccatgagaaggtcaaatatgtgtaataaatgaatttgcttcaaa

SEQ ID NO: 116 - DNA, 1713 bp, Homo sapiens
  misc_feature: IL3RA isoform 1 mRNA
gtcaggttcatggttacgaagctgctgaccccaggatcccagcccgtgggagagaagggggtctctgacagcccccacccctccccactgccagatccttattgggtctgagtttcaggggtggggccccagctggaggttataaaacagctcaatcggggagtacaaccttcggtttctcttcggggaaagctgctttcagcgcacacgggaagatatcagaaacatcctaggatcaggacaccccagatcttctcaactggaaccacgaaggctgtttcttccacacagtactttgatctccatttaagcaggcacctctgtcctgcgttccggagctgcgttcccgatggtcctcctttggctcacgctgctcctgatcgccctgccctgtctcctgcaaacgaaggaagatccaaacccaccaatcacgaacctaaggatgaaagcaaaggctcagcagttgacctgggaccttaacagaaatgtgaccgatatcgagtgtgttaaagacgccgactattctatgccggcagtgaacaatagctattgccagtttggagcaatttccttatgtgaagtgaccaactacaccgtccgagtggccaacccaccattctccacgtggatcctcttccctgagaacagtgggaagccttgggcaggtgcggagaatctgacctgctggattcatgacgtggatttcttgagctgcagctgggcggtaggcccgggggcccccgcggacgtccagtacgacctgtacttgaacgttgccaacaggcgtcaacagtacgagtgtcttcactacaaaacggatgctcagggaacacgtatcgggtgtcgtttcgatgacatctctcgactctccagcggttctcaaagttcccacatcctggtgcggggcaggagcgcagccttcggtatcccctgcacagataagtttgtcgtcttttcacagattgagatattaactccacccaacatgactgcaaagtgtaataagacacattcctttatgcactggaaaatgagaagtcatttcaatcgcaaatttcgctatgagcttcagatacaaaagagaatgcagcctgtaatcacagaacaggtcagagacagaacctccttccagctactcaatcctggaacgtacacagtacaaataagagcccgggaaagagtgtatgaattcttgagcgcctggagcaccccccagcgcttcgagtgcgaccaggaggagggcgcaaacacacgtgcctggcggacgtcgctgctgatcgcgctggggacgctgctggccctggtctgtgtcttcgtgatctgcagaaggtatctggtgatgcagagactctttccccgcatccctcacatgaaagaccccatcggtgacagcttccaaaacgacaagctggtggtctgggaggcgggcaaagccggcctggaggagtgtctggtgactgaagtacaggtcgtgcagaaaacttgagactggggttcagggcttgtgggggtctgcctcaatctccctggccgggccaggcgcctgcacagactggctgctggacctgcgcacgcagcccaggaatggacattcctaacgggtggtgggcatgggagatgcctgtgtaatttcgtccgaagctgccaggaagaagaacagaactttgtgtgtttatttcatgataaagtgatttttttttttttaacccaaaa

SEQ ID NO: 117 - DNA, 1479 bp, Homo sapiens
  misc_feature: IL3RA isoform 2 mRNA
gtcaggttcatggttacgaagctgctgaccccaggatcccagcccgtgggagagaagggggtctctgacagcccccacccctccccactgccagatccttattgggtctgagtttcaggggtggggccccagctggaggttataaaacagctcaatcggggagtacaaccttcggtttctcttcggggaaagctgctttcagcgcacacgggaagatatcagaaacatcctaggatcaggacaccccagatcttctcaactggaaccacgaaggctgtttcttccacacagtactttgatctccatttaagcaggcacctctgtcctgcgttccggagctgcgttcccgatggtcctcctttggctcacgctgctcctgatcgccctgccctgtctcctgcaaacgaaggaaggtgggaagccttgggcaggtgcggagaatctgacctgctggattcatgacgtggatttcttgagctgcagctgggcggtaggcccgggggcccccgcggacgtccagtacgacctgtacttgaacgttgccaacaggcgtcaacagtacgagtgtcttcactacaaaacggatgctcagggaacacgtatcgggtgtcgtttcgatgacatctctcgactctccagcggttctcaaagttcccacatcctggtgcggggcaggagcgcagccttcggtatcccctgcacagataagtttgtcgtcttttcacagattgagatattaactccacccaacatgactgcaaagtgtaataagacacattcctttatgcactggaaaatgagaagtcatttcaatcgcaaatttcgctatgagcttcagatacaaaagagaatgcagcctgtaatcacagaacaggtcagagacagaacctccttccagctactcaatcctggaacgtacacagtacaaataagagcccgggaaagagtgtatgaattcttgagcgcctggagcaccccccagcgcttcgagtgcgaccaggaggagggcgcaaacacacgtgcctggcggacgtcgctgctgatcgcgctggggacgctgctggccctggtctgtgtcttcgtgatctgcagaaggtatctggtgatgcagagactctttccccgcatccctcacatgaaagaccccatcggtgacagcttccaaaacgacaagctggtggtctgggaggcgggcaaagccggcctggaggagtgtctggtgactgaagtacaggtcgtgcagaaaacttgagactggggttcagggcttgtgggggtctgcctcaatctccctggccgggccaggcgcctgcacagactggctgctggacctgcgcacgcagcccaggaatggacattcctaacgggtggtgggcatgggagatgcctgtgtaatttcgtccgaagctgccaggaagaagaacagaactttgtgtgtttatttcatgataaagtgatttttttttttttaacccaaaa

SEQ ID NO: 118 - DNA, 8352 bp, Homo sapiens
  misc_feature: IGF2BP1 isofrom 1 mRNA
atttagaggcggcgccagggcggccgcggagaaacgtgacacaccagccctctcggaggggtttcggaccgaagggaagaagctgcgccgtgtcgtccgtctccctgcgcgccgcgggcacttctcctgggctctccccgaactctcccgcgacctctgcgcgccctcaggccgccttccccgccctgggctcgggacaacttctggggtggggtgcaaagaaagtttgcggctcctgccgccggcctctccgcctcttggcctaggaggctcgccgcccgcgcccgctcgttcggccttgcccgggaccgcgtcctgccccgagaccgccaccatgaacaagctttacatcggcaacctcaacgagagcgtgacccccgcggacttggagaaagtgtttgcggagcacaagatctcctacagcggccagttcttggtcaaatccggctacgccttcgtggactgcccggacgagcactgggcgatgaaggccatcgaaactttctccgggaaagtagaattacaaggaaaacgcttagagattgaacattcggtgcccaaaaaacaaaggagccggaaaattcaaatccgaaatattccaccccagctccgatgggaagtactggacagcctgctggctcagtatggtacagtagagaactgtgagcaagtgaacaccgagagtgagacggcagtggtgaatgtcacctattccaaccgggagcagaccaggcaggctgacgaggttcccctgaagatcctggcccataataactttgtagggcgtctcattggcaaggaaggacggaacctgaagaaggtagagcaagataccgagacaaaaatcaccatctcctcgttgcaagaccttaccctttacaaccctgagaggaccatcactgtgaagggggccatcgagaattgttgcagggccgagcaggaaataatgaagaaagttcgggaggcctatgagaatgatgtggctgccatgagcctgcagtctcacctgatccctggcctgaacctggctgctgtaggtcttttcccagcttcatccagcgcagtcccgccgcctcccagcagcgttactggggctgctccctatagctcctttatgcaggctcccgagcaggagatggtgcaggtgtttatccccgcccaggcagtgggcgccatcatcggcaagaaggggcagcacatcaaacagctctcccggtttgccagcgcctccatcaagattgcaccacccgaaacacctgactccaaagttcgtatggttatcatcactggaccgccagaggcccaattcaaggctcagggaagaatctatggcaaactcaaggaggagaacttctttggtcccaaggaggaagtgaagctggagacccacatacgtgtgccagcatcagcagctggccgggtcattggcaaaggtggaaaaacggtgaacgagttgcagaatttgacggcagctgaggtggtagtaccaagagaccagacccctgatgagaacgaccaggtcatcgtgaaaatcatcggacatttctatgccagtcagatggctcaacggaagatccgagacatcctggcccaggttaagcagcagcatcagaagggacagagtaaccaggcccaggcacggaggaagtgaccagcccctccctgtcccttcgagtccaggacaacaacgggcagaaatcgagagtgtgctctccccggcaggcctgagaatgagtgggaatccgggacacctgggccgggctgtagatcaggtttgcccacttgattgagaaagatgttccagtgaggaaccctgatctctcagccccaaacacccacccaattggcccaacactgtctgcccctcggggtgtcagaaattctagcgcaaggcacttttaaacgtggattgtttaaagaagctctccaggccccaccaagagggtggatcacacctcagtgggaagaaaaataaaatttccttcaggttttaaaaacatgcagagaggtgttttaatcagccttaaaggatggttcatttcttgaccttaatgtttttccaatcttcttccccctacttgggtaattgattaaaatacctccatttacggcctctttctatatttacactaatttttttatctttattgctaccagaaaaaaatgcgaacgaatgcattgctttgcttacagtattgactcaagggaaaagaactgtcagtatctgtagattaattccaatcactccctaaccaataggtacaatacggaatgaagaagaggggaaaatggggagaaagatggttaaaatacataataatccacgtttaaaaggagcgcacttgtggctgatctatgccagatcaccatcttcaaattggcacaactgaaatttccccactctgttggggcttccccaccacattcatgtccctctcccgtgtaggtttcacattatgtccaggtgcacataggtggtattgaatgctcagcagggtaggggctgaccactgtccctgattcccatcgttctcaggcggattttatatttttttaaagtctattttaatgattggatatgagcactgggaaggggacgctaactccccttgataaagtctcggttccatggaggacttgagtggccccaaaggctgccacggtgccctcaccccagcccatgtgctcccataagggctggttcctagaggcaggggttgtggggcactcccagccacggcactgttaccttggtggtgggacttggaacccaaccctgagctcccgataaagctaaagtccatcatctggcaaattcagtaaattggagagtacttgcttctgtttgtatctgagaggaatttttaactgacggcttctgtctccatgaatcattatcagcatgatgaaaggtgtgtctaaaaaacaattcagaataccagcagcattgtacagcaaggggtaaataagcttaatttattaatttaccaggcttaattaagatcccatggagtgtttagcccttgtgggagacagaagccatcagttaaatgaggttaggcctctcctcctaatatactgattgacaatgcatattagccaggtaatgcactttagctaccctggacaatgctatcaagtgtgctgggaagggaggaaggcctctctacatatggaaaagcccatgcgtggagttcccctcctttcaacattgcaacaacagtaacaacaagacaaccgcaacatgtgggcgtagtcaggcaatgctgtgtgcgaagtaaactacctcaaggtatgaagttacctcagcaattattttcctttttgttccccccaaccccattaaaaaaatttttttttgatttttgtttttttgcagcttgctgatattttatataaaaaagaaaagcaaagcaaaagagaagctgatagtcttgaatattttatttttttaatgaaaagaaaaaacaagaaagttatgtttcataatttcttacaacatgagccagtaaccctttaggaactctctatggagaacaggcctggtgggaaaggctttgggggctgcccccttaggaggaggctagtgctaagagggaaggcccaggtttgagagagcccagaggggcagagcccagagccttgtttggccctgatctctgacttctagagccccagctgctggcggctgctggaatatcctacctgataggattaaaaggcctagtggagctgggggctctcagtggttaaacaatgcccaacaaccaaccagctggcccttggtctcctctctttcctcctttggttaaagagcatctcagccagcttttcccaccagtggtgctgttgagatattttaaaatattgcctccgttttatcgaggagagaaataataactaaaaaatataccctttaaaaaaacctatatttctctgtctaaaaatatgggagctgagattccgttcgtggaaaaaagacaaggccaccctctcgccctcagagaggtccacctggtttgtcattgcaatgcttttcattttttttttttgttattgtttcatttcagttccgtcttgctattcttcctaatctatatccatagatctaaggggcaaacagatactagttaactgcccccacctctgtctccctgtcttctttagatcggtctgattgattttaaaagtggacccaaacttagggaattcttgatttagggtggctggtggcaaggaggggcaggggatatggggacgtgactgggacaggttcctgccttatcattttctccctaggacattcccttgtagcccccagaattgtctggcccaaattgaatagaagcagaaaaacatttagggataacatcaggccagtagaattaagcctctccacctgtcccaaccataaaaagggtctcccagctttccatctctggctctatatgctttatcccaaaacaaagcagataacgttcagacgtcggccatttagtaatttaaagcgaatttccagcagcaagcatgctttgatatctggttcagactatcatcaggaagaaaaaaaaatcccacagtacctgaaatgtgattgttgcagtgttcagtttccttgggggcctgctcccttcacaccttgagcccaagtccttttccgttggctgattcagctcccagaagagacgaggaagtgtgtggcaagggactggaaaacttcacttgcttggattaggcaaggctccactcattgttgatatttgcccagcaggaaaatcatgtaagttataccaccagaaagcaaaaggagcatggtttggtggttaaggtttagtgggatgaaggacctgtcttggtgggccgggccctcttgtgccccgtaggctaggtcttagggcaactccttgccctcctgctcagcacctccatttccccatccttggtgagataacaagctatcgcgaaaagcacttgggagatttggatgatttgagaagagtgacttaaaaaaaatgcttctgtgctctaagatatatatgtgtgtgtgtgtgctacatatatatttttaagaaaggaccatctctttaggatatatttttaaattctttgaaacacataaccaaaatggtttgattcactgactgactttgaagctgcatctgccagttacaccccaaatggctttaatcccctctcgggtctggttgccttttgcagtttgggttgtggactcagctcctgtgaggggtctggttaggagagagccatttttaaggacagggagttttatagcccttttctactttcctcccctcctcccagtccttatcaatcttttttcctttttcctgaccccctccttctggaggcagttgggagctatccttgtttatgcctcactattggcagaaaagaccccatttaaaacccagagaacactggagggggatgctctagttggttctgtgtccattttcctctgtgccaaagacagacagacagaggctgagagaggctgttcctgaatcaaagcaatagccagctttcgacacatacctggctgtctgaggaggaaggcctcctggaaactgggagctaagggcgaggcccttcccttcagaggctcctgggggattagggtgtggtgtttgccaagccaaggggtagggagccgagaaattggtctgtcggctcctggttgcactttggggaaggagaggaagtttggggctccaggtagctccctgttgtgggactgctctgtcccctgcccctactgcagagatagcactgccgagttcccttcaggcctggcagacgggcagtgaggaggggcctcagttagctctcaagggtgccttcccctcctcccaacccagacataccctctgccaaactgggaaccagcagtgctagtaactacctcacagagccccagagggcctgcttgagccttcttgctccacaggagaagctggtgcctctaggcaaccccttcctcccacctctcatcaggggtgggggttctcctttctttcccctgaagtgtttatggggagatcctagtggctttgccattcaaaccactcgactgtttgcctgtttcttgaaaaccagtagaagggaaacagcacagcctgtcacagtaattgcaggaagattgaagaaaaatcctcatcaatgccaggggacataaaagccatttcccttccaaatactcgacaatttagatgcagaacatttctctgtattcagacttagagtaacaccagctgaaaactgcagtttctttcctttggatacataaggcttctctatcggggtacgggacagggaggaggcctcatgtctgaagggggatttaggggcgagagccccagccctgaccctcggtcctgtgcaccgctttggggcacagtctgatggcgcctttgctggcgccttagtatggttgactccggatggacaaaagaaaaaaaattttttttcttgaatgaaatagcaggaagctcctcgggagcatgtgttttgattaaccgcaggtgatggatgctacgagtataaatggattaactacctcaatccttacagtaagattggaactaagggcagggactcatgcataagggtatgaatcccagccaggacaagtgagttgaggcttgtgccacaaaaggtttgtccttggggaacaggcaggcctgccaggatcccccccatatcgattgggctgggagggctggccatgaggtccccactttctgctttccttgcccatgtgtcacccctttggcctccagcttgtccctctctcactttctatagctttgttggaccagatggtgaggaaaggaatggcctcttcccttctagagggggctggctggagtgagacctggggcttggcctggaacccaccacacagccccaaagtcaggaagcctggggaaaccagagctgagacctcttcaacagggtttctttgagatcctacacctccattgggccctttttcagtcttcaatgggggcccagttggctctagaaggagaagaggtgaagcaggatcctttgccctgggggagtctgagggcgcggtccttggactcattcaggccgtctttgtagttgggggagttccactgggcgatcccagcccctccccacccaccctctaatggacctcctcatagaagccccatttcacttttgttttatctacctcttagcaaaacaatagataaattaggtagtggcagctccacttgcttaggttagggggggaaaaagatttctttttccaaaggaaaaaaatattaccttgagaatactttccaaaaaataaaattaaaaaaaaaaaaaccaaaaaaaaaaatttttttttaaaagggagacattttccagtgaccactggattgttttaatttcccaagcttttttttcccccataaataagtttcactctttggcgattttcttcacttgtttaagataacgtgctagctattccaacaggtaacagctttcacagtctgcccctggcctgtctcaccccatcccccaccctattcctgccagtgagtccttcctgtgcttctctcccttctcccctcccagccagctgacttcagtcacccctgtcccccctcccctgccaataagctcccccaggaataaaggctttgttttggggatgcttaaatcttgactggcacttcccggctgtgggggctggggagccacttgtaacatttctgtgcagattttatgttagccactgctatgtaaaagcacgttcaaaatgaatttcagcagattatgtgttaccataatgaataaacgtcctctatcaccatttggagtctcccttttctccaggatcttgatcctggtccccaaaaccagagtgaatcaaaagagcttcctcccctgaggcaaagtggatttgtaagcagttctgaaacatcacttactcagaagagggaacgatgtattttgatgagtgcaaattgggaagagctggaggcctactgcttgggacagttttttttttttttttttttttaaatatgagtgctagcttattctgtaattgcggcaactttgaaaattgtattttactggaaatctgccagccatcaccacccgattttgattgtatccttcctcccatcctttaatctgttcattgctttgggggaggtggggcagctggctcacacgttggagtttgttctttgatggatgaacgaacactccagttttctttcccgtgaaggttgtttcagccacaaaccacttcattttgctgtttcaatttcaaaataaaaggaaacttatattgaaagacaa

SEQ ID NO: 119 - DNA, 8769 bp, Homo sapiens
  misc_feature: IGF2BP1 isoform 2 mRNA
atttagaggcggcgccagggcggccgcggagaaacgtgacacaccagccctctcggaggggtttcggaccgaagggaagaagctgcgccgtgtcgtccgtctccctgcgcgccgcgggcacttctcctgggctctccccgaactctcccgcgacctctgcgcgccctcaggccgccttccccgccctgggctcgggacaacttctggggtggggtgcaaagaaagtttgcggctcctgccgccggcctctccgcctcttggcctaggaggctcgccgcccgcgcccgctcgttcggccttgcccgggaccgcgtcctgccccgagaccgccaccatgaacaagctttacatcggcaacctcaacgagagcgtgacccccgcggacttggagaaagtgtttgcggagcacaagatctcctacagcggccagttcttggtcaaatccggctacgccttcgtggactgcccggacgagcactgggcgatgaaggccatcgaaactttctccgggaaagtagaattacaaggaaaacgcttagagattgaacattcggtgcccaaaaaacaaaggagccggaaaattcaaatccgaaatattccaccccagctccgatgggaagtactggacagcctgctggctcagtatggtacagtagagaactgtgagcaagtgaacaccgagagtgagacggcagtggtgaatgtcacctattccaaccgggagcagaccaggcaagccatcatgaagctgaatggccaccagttggagaaccatgccctgaaggtctcctacatccccgatgagcagatagcacagggacctgagaatgggcgccgagggggctttggctctcggggtcagccccgccagggctcacctgtggcagcgggggccccagccaagcagcagcaagtggacatcccccttcggctcctggtgcccacccagtatgtgggtgccattattggcaaggagggggccaccatccgcaacatcacaaaacagacccagtccaagatagacgtgcataggaaggagaacgcaggtgcagctgaaaaagccatcagtgtgcactccacccctgagggctgctcctccgcttgtaagatgatcttggagattatgcataaagaggctaaggacaccaaaacggctgacgaggttcccctgaagatcctggcccataataactttgtagggcgtctcattggcaaggaaggacggaacctgaagaaggtagagcaagataccgagacaaaaatcaccatctcctcgttgcaagaccttaccctttacaaccctgagaggaccatcactgtgaagggggccatcgagaattgttgcagggccgagcaggaaataatgaagaaagttcgggaggcctatgagaatgatgtggctgccatgagcctgcagtctcacctgatccctggcctgaacctggctgctgtaggtcttttcccagcttcatccagcgcagtcccgccgcctcccagcagcgttactggggctgctccctatagctcctttatgcaggctcccgagcaggagatggtgcaggtgtttatccccgcccaggcagtgggcgccatcatcggcaagaaggggcagcacatcaaacagctctcccggtttgccagcgcctccatcaagattgcaccacccgaaacacctgactccaaagttcgtatggttatcatcactggaccgccagaggcccaattcaaggctcagggaagaatctatggcaaactcaaggaggagaacttctttggtcccaaggaggaagtgaagctggagacccacatacgtgtgccagcatcagcagctggccgggtcattggcaaaggtggaaaaacggtgaacgagttgcagaatttgacggcagctgaggtggtagtaccaagagaccagacccctgatgagaacgaccaggtcatcgtgaaaatcatcggacatttctatgccagtcagatggctcaacggaagatccgagacatcctggcccaggttaagcagcagcatcagaagggacagagtaaccaggcccaggcacggaggaagtgaccagcccctccctgtcccttcgagtccaggacaacaacgggcagaaatcgagagtgtgctctccccggcaggcctgagaatgagtgggaatccgggacacctgggccgggctgtagatcaggtttgcccacttgattgagaaagatgttccagtgaggaaccctgatctctcagccccaaacacccacccaattggcccaacactgtctgcccctcggggtgtcagaaattctagcgcaaggcacttttaaacgtggattgtttaaagaagctctccaggccccaccaagagggtggatcacacctcagtgggaagaaaaataaaatttccttcaggttttaaaaacatgcagagaggtgttttaatcagccttaaaggatggttcatttcttgaccttaatgtttttccaatcttcttccccctacttgggtaattgattaaaatacctccatttacggcctctttctatatttacactaatttttttatctttattgctaccagaaaaaaatgcgaacgaatgcattgctttgcttacagtattgactcaagggaaaagaactgtcagtatctgtagattaattccaatcactccctaaccaataggtacaatacggaatgaagaagaggggaaaatggggagaaagatggttaaaatacataataatccacgtttaaaaggagcgcacttgtggctgatctatgccagatcaccatcttcaaattggcacaactgaaatttccccactctgttggggcttccccaccacattcatgtccctctcccgtgtaggtttcacattatgtccaggtgcacataggtggtattgaatgctcagcagggtaggggctgaccactgtccctgattcccatcgttctcaggcggattttatatttttttaaagtctattttaatgattggatatgagcactgggaaggggacgctaactccccttgataaagtctcggttccatggaggacttgagtggccccaaaggctgccacggtgccctcaccccagcccatgtgctcccataagggctggttcctagaggcaggggttgtggggcactcccagccacggcactgttaccttggtggtgggacttggaacccaaccctgagctcccgataaagctaaagtccatcatctggcaaattcagtaaattggagagtacttgcttctgtttgtatctgagaggaatttttaactgacggcttctgtctccatgaatcattatcagcatgatgaaaggtgtgtctaaaaaacaattcagaataccagcagcattgtacagcaaggggtaaataagcttaatttattaatttaccaggcttaattaagatcccatggagtgtttagcccttgtgggagacagaagccatcagttaaatgaggttaggcctctcctcctaatatactgattgacaatgcatattagccaggtaatgcactttagctaccctggacaatgctatcaagtgtgctgggaagggaggaaggcctctctacatatggaaaagcccatgcgtggagttcccctcctttcaacattgcaacaacagtaacaacaagacaaccgcaacatgtgggcgtagtcaggcaatgctgtgtgcgaagtaaactacctcaaggtatgaagttacctcagcaattattttcctttttgttccccccaaccccattaaaaaaatttttttttgatttttgtttttttgcagcttgctgatattttatataaaaaagaaaagcaaagcaaaagagaagctgatagtcttgaatattttatttttttaatgaaaagaaaaaacaagaaagttatgtttcataatttcttacaacatgagccagtaaccctttaggaactctctatggagaacaggcctggtgggaaaggctttgggggctgcccccttaggaggaggctagtgctaagagggaaggcccaggtttgagagagcccagaggggcagagcccagagccttgtttggccctgatctctgacttctagagccccagctgctggcggctgctggaatatcctacctgataggattaaaaggcctagtggagctgggggctctcagtggttaaacaatgcccaacaaccaaccagctggcccttggtctcctctctttcctcctttggttaaagagcatctcagccagcttttcccaccagtggtgctgttgagatattttaaaatattgcctccgttttatcgaggagagaaataataactaaaaaatataccctttaaaaaaacctatatttctctgtctaaaaatatgggagctgagattccgttcgtggaaaaaagacaaggccaccctctcgccctcagagaggtccacctggtttgtcattgcaatgcttttcattttttttttttgttattgtttcatttcagttccgtcttgctattcttcctaatctatatccatagatctaaggggcaaacagatactagttaactgcccccacctctgtctccctgtcttctttagatcggtctgattgattttaaaagtggacccaaacttagggaattcttgatttagggtggctggtggcaaggaggggcaggggatatggggacgtgactgggacaggttcctgccttatcattttctccctaggacattcccttgtagcccccagaattgtctggcccaaattgaatagaagcagaaaaacatttagggataacatcaggccagtagaattaagcctctccacctgtcccaaccataaaaagggtctcccagctttccatctctggctctatatgctttatcccaaaacaaagcagataacgttcagacgtcggccatttagtaatttaaagcgaatttccagcagcaagcatgctttgatatctggttcagactatcatcaggaagaaaaaaaaatcccacagtacctgaaatgtgattgttgcagtgttcagtttccttgggggcctgctcccttcacaccttgagcccaagtccttttccgttggctgattcagctcccagaagagacgaggaagtgtgtggcaagggactggaaaacttcacttgcttggattaggcaaggctccactcattgttgatatttgcccagcaggaaaatcatgtaagttataccaccagaaagcaaaaggagcatggtttggtggttaaggtttagtgggatgaaggacctgtcttggtgggccgggccctcttgtgccccgtaggctaggtcttagggcaactccttgccctcctgctcagcacctccatttccccatccttggtgagataacaagctatcgcgaaaagcacttgggagatttggatgatttgagaagagtgacttaaaaaaaatgcttctgtgctctaagatatatatgtgtgtgtgtgtgctacatatatatttttaagaaaggaccatctctttaggatatatttttaaattctttgaaacacataaccaaaatggtttgattcactgactgactttgaagctgcatctgccagttacaccccaaatggctttaatcccctctcgggtctggttgccttttgcagtttgggttgtggactcagctcctgtgaggggtctggttaggagagagccatttttaaggacagggagttttatagcccttttctactttcctcccctcctcccagtccttatcaatcttttttcctttttcctgaccccctccttctggaggcagttgggagctatccttgtttatgcctcactattggcagaaaagaccccatttaaaacccagagaacactggagggggatgctctagttggttctgtgtccattttcctctgtgccaaagacagacagacagaggctgagagaggctgttcctgaatcaaagcaatagccagctttcgacacatacctggctgtctgaggaggaaggcctcctggaaactgggagctaagggcgaggcccttcccttcagaggctcctgggggattagggtgtggtgtttgccaagccaaggggtagggagccgagaaattggtctgtcggctcctggttgcactttggggaaggagaggaagtttggggctccaggtagctccctgttgtgggactgctctgtcccctgcccctactgcagagatagcactgccgagttcccttcaggcctggcagacgggcagtgaggaggggcctcagttagctctcaagggtgccttcccctcctcccaacccagacataccctctgccaaactgggaaccagcagtgctagtaactacctcacagagccccagagggcctgcttgagccttcttgctccacaggagaagctggtgcctctaggcaaccccttcctcccacctctcatcaggggtgggggttctcctttctttcccctgaagtgtttatggggagatcctagtggctttgccattcaaaccactcgactgtttgcctgtttcttgaaaaccagtagaagggaaacagcacagcctgtcacagtaattgcaggaagattgaagaaaaatcctcatcaatgccaggggacataaaagccatttcccttccaaatactcgacaatttagatgcagaacatttctctgtattcagacttagagtaacaccagctgaaaactgcagtttctttcctttggatacataaggcttctctatcggggtacgggacagggaggaggcctcatgtctgaagggggatttaggggcgagagccccagccctgaccctcggtcctgtgcaccgctttggggcacagtctgatggcgcctttgctggcgccttagtatggttgactccggatggacaaaagaaaaaaaattttttttcttgaatgaaatagcaggaagctcctcgggagcatgtgttttgattaaccgcaggtgatggatgctacgagtataaatggattaactacctcaatccttacagtaagattggaactaagggcagggactcatgcataagggtatgaatcccagccaggacaagtgagttgaggcttgtgccacaaaaggtttgtccttggggaacaggcaggcctgccaggatcccccccatatcgattgggctgggagggctggccatgaggtccccactttctgctttccttgcccatgtgtcacccctttggcctccagcttgtccctctctcactttctatagctttgttggaccagatggtgaggaaaggaatggcctcttcccttctagagggggctggctggagtgagacctggggcttggcctggaacccaccacacagccccaaagtcaggaagcctggggaaaccagagctgagacctcttcaacagggtttctttgagatcctacacctccattgggccctttttcagtcttcaatgggggcccagttggctctagaaggagaagaggtgaagcaggatcctttgccctgggggagtctgagggcgcggtccttggactcattcaggccgtctttgtagttgggggagttccactgggcgatcccagcccctccccacccaccctctaatggacctcctcatagaagccccatttcacttttgttttatctacctcttagcaaaacaatagataaattaggtagtggcagctccacttgcttaggttagggggggaaaaagatttctttttccaaaggaaaaaaatattaccttgagaatactttccaaaaaataaaattaaaaaaaaaaaaaccaaaaaaaaaaatttttttttaaaagggagacattttccagtgaccactggattgttttaatttcccaagcttttttttcccccataaataagtttcactctttggcgattttcttcacttgtttaagataacgtgctagctattccaacaggtaacagctttcacagtctgcccctggcctgtctcaccccatcccccaccctattcctgccagtgagtccttcctgtgcttctctcccttctcccctcccagccagctgacttcagtcacccctgtcccccctcccctgccaataagctcccccaggaataaaggctttgttttggggatgcttaaatcttgactggcacttcccggctgtgggggctggggagccacttgtaacatttctgtgcagattttatgttagccactgctatgtaaaagcacgttcaaaatgaatttcagcagattatgtgttaccataatgaataaacgtcctctatcaccatttggagtctcccttttctccaggatcttgatcctggtccccaaaaccagagtgaatcaaaagagcttcctcccctgaggcaaagtggatttgtaagcagttctgaaacatcacttactcagaagagggaacgatgtattttgatgagtgcaaattgggaagagctggaggcctactgcttgggacagttttttttttttttttttttttaaatatgagtgctagcttattctgtaattgcggcaactttgaaaattgtattttactggaaatctgccagccatcaccacccgattttgattgtatccttcctcccatcctttaatctgttcattgctttgggggaggtggggcagctggctcacacgttggagtttgttctttgatggatgaacgaacactccagttttctttcccgtgaaggttgtttcagccacaaaccacttcattttgctgtttcaatttcaaaataaaaggaaacttatattgaaagacaa

SEQ ID NO: 120 - protein, 272 aa, Homo sapiens
  misc_feature: IL2RA Protein isoform 1 precursor
MDSYLLMWGLLTFIMVPGCQAELCDDDPPEIPHATFKAMAYKEGTMLNCECKRGFRRIKSGSLYMLCTGNSSHSSWDNQCQCTSSATRNTTKQVTPQPEEQKERKTTEMQSPMQPVDQASLPGHCREPPPWENEATERIYHFVVGQMVYYQCVQGYRALHRGPAESVCKMTHGKTRWTQPQLICTGEMETSQFPGEEKPQASPEGRPESETSCLVTTTDFQIQTEMAATMETSIFTTEYQVAVAGCVFLLISVLLLSGLTWQRRQRKSRRTI

SEQ ID NO: 121 - protein, 200 aa, Homo sapiens
  misc_feature: IL2RA Protein isoform 2 precursor
MDSYLLMWGLLTFIMVPGCQAELCDDDPPEIPHATFKAMAYKEGTMLNCECKRGFRRIKSGSLYMLCTGNSSHSSWDNQCQCTSSATRNTTKQVTPQPEEQKERKTTEMQSPMQPVDQASLPGEEKPQASPEGRPESETSCLVTTTDFQIQTEMAATMETSIFTTEYQVAVAGCVFLLISVLLLSGLTWQRRQRKSRRTI

SEQ ID NO: 122 - protein, 176 aa, Homo sapiens
  misc_feature: IL2RA Protein isoform 3 precursor
MDSYLLMWGLLTFIMVPGCQAELCDDDPPEIPHATFKAMAYKEGTMLNCECKRGFRRIKSGSLYMLCTGNSSHSSWDNQCQCTSSATRNTTKQVTPQPEEQKERKTTEMQSPMQPVDQASLPDFQIQTEMAATMETSIFTTEYQVAVAGCVFLLISVLLLSGLTWQRRQRKSRRTI

SEQ ID NO: 123 - protein, 1025 aa, Homo sapiens
  misc_feature: ATP9A protein
MCCEWLRCCGGGEARPRTVWLGHPEKRDQRYPRNVINNQKYNFFTFLPGVLFNQFKYFFNLYFLLLACSQFVPEMRLGALYTYWVPLGFVLAVTVIREAVEEIRCYVRDKEVNSQVYSRLTARGTVKVKSSNIQVGDLIIVEKNQRVPADMIFLRTSEKNGSCFLRTDQLDGETDWKLRLPVACTQRLPTAADLLQIRSYVYAEEPNIDIHNFVGTFTREDSDPPISESLSIENTLWAGTVVASGTVVGVVLYTGRELRSVMNTSNPRSKIGLFDLEVNCLTKILFGALVVVSLVMVALQHFAGRWYLQIIRFLLLFSNIIPISLRVNLDMGKIVYSWVIRRDSKIPGTVVRSSTIPEQLGRISYLLTDKTGTLTQNEMIFKRLHLGTVAYGLDSMDEVQSHIFSIYTQQSQDPPAQKGPTLTTKVRRTMSSRVHEAVKAIALCHNVTPVYESNGVTDQAEAEKQYEDSCRVYQASSPDEVALVQWTESVGLTLVGRDQSSMQLRTPGDQILNFTILQIFPFTYESKRMGIIVRDESTGEITFYMKGADVVMAGIVQYNDWLEEECGNMAREGLRVLVVAKKSLAEEQYQDFEARYVQAKLSVHDRSLKVATVIESLEMEMELLCLTGVEDQLQADVRPTLETLRNAGIKVWMLTGDKLETATCTAKNAHLVTRNQDIHVFRLVTNRGEAHLELNAFRRKHDCALVISGDSLEVCLKYYEYEFMELACQCPAVVCCRCAPTQKAQIVRLLQERTGKLTCAVGDGGNDVSMIQESDCGVGVEGKEGKQASLAADFSITQFKHLGRLLMVHGRNSYKRSAALSQFVIHRSLCISTMQAVFSSVFYFASVPLYQGFLIIGYSTIYTMFPVFSLVLDKDVKSEVAMLYPELYKDLLKGRPLSYKTFLIWVLISIYQGSTIMYGALLLFESEFVHIVAISFTSLILTELLMVALTIQTWHWLMTVAELLSLACYIASLVFLHEFIDVYFIATLSFLWKVSVITLVSCLPLYVLKYLRRRFSPPSYSKLTS

SEQ ID NO: 124 - protein, 356 aa, Homo sapiens
  misc_feature: HMX3 protein
MPEPGPDAAGTASAQPQPPPPPPPAPKESPFSIKNLLNGDHHRPPPKPQPPPRTLFAPASAAAAAAAAAAAAAKGALEGAAGFALSQVGDLAFPRFEIPAQRFALPAHYLERSPAWWYPYTLTPAGGHLPRPEASEKALLRDSSPASGTDRDSPEPLLKADPDHKELDSKSPDEIILEESDSEESKKEGEAAPGAAGASVGAAAATPGAEDWKKGAESPEKKPACRKKKTRTVFSRSQVFQLESTFDMKRYLSSSERAGLAASLHLTETQVKIWFQNRRNKWKRQLAAELEAANLSHAAAQRIVRVPILYHENSAAEGAAAAAAGAPVPVSQPLLTFPHPVYYSHPVVSSVPLLRP

SEQ ID NO: 125 - protein, 684 aa, Homo sapiens
  misc_feature: DPYSL3 isoform 1 protein
MASGRRGWDSSHEDDLPVYLARPGTTDQVPRQKYGGMFCNVEGAFESKTLDFDALSVGQRGAKTPRSGQGSDRGSGSRPGIEGDTPRRGQGREESREPAPASPAPAGVEIRSATGKEVLQNLGPKDKSDRLLIKGGRIVNDDQSFYADIYMEDGLIKQIGDNLIVPGGVKTIEANGKMVIPGGIDVHTHFQMPYKGMTTVDDFFQGTKAALAGGTTMIIDHVVPEPESSLTEAYEKWREWADGKSCCDYALHVDITHWNDSVKQEVQNLIKDKGVNSFMVYMAYKDLYQVSNTELYEIFTCLGELGAIAQVHAENGDIIAQEQTRMLEMGITGPEGHVLSRPEELEAEAVFRAITIASQTNCPLYVTKVMSKSAADLISQARKKGNVVFGEPITASLGIDGTHYWSKNWAKAAAFVTSPPLSPDPTTPDYINSLLASGDLQLSGSAHCTFSTAQKAIGKDNFTAIPEGTNGVEERMSVIWDKAVATGKMDENQFVAVTSTNAAKIFNLYPRKGRISVGSDSDLVIWDPDAVKIVSAKNHQSAAEYNIFEGMELRGAPLVVICQGKIMLEDGNLHVTQGAGRFIPCSPFSDYVYKRIKARRKMADLHAVPRGMYDGPVFDLTTTPKGGTPAGSARGSPTRPNPPVRNLHQSGFSLSGTQVDEGVRSASKRIVAPPGGRSNITSLS

SEQ ID NO: 126 - protein, 570 aa, Homo sapiens
  misc_feature: DPYSL3 isoform 2 protein
MSYQGKKNIPRITSDRLLIKGGRIVNDDQSFYADIYMEDGLIKQIGDNLIVPGGVKTIEANGKMVIPGGIDVHTHFQMPYKGMTTVDDFFQGTKAALAGGTTMIIDHVVPEPESSLTEAYEKWREWADGKSCCDYALHVDITHWNDSVKQEVQNLIKDKGVNSFMVYMAYKDLYQVSNTELYEIFTCLGELGAIAQVHAENGDIIAQEQTRMLEMGITGPEGHVLSRPEELEAEAVFRAITIASQTNCPLYVTKVMSKSAADLISQARKKGNVVFGEPITASLGIDGTHYWSKNWAKAAAFVTSPPLSPDPTTPDYINSLLASGDLQLSGSAHCTFSTAQKAIGKDNFTAIPEGTNGVEERMSVIWDKAVATGKMDENQFVAVTSTNAAKIFNLYPRKGRISVGSDSDLVIWDPDAVKIVSAKNHQSAAEYNIFEGMELRGAPLVVICQGKIMLEDGNLHVTQGAGRFIPCSPFSDYVYKRIKARRKMADLHAVPRGMYDGPVFDLTTTPKGGTPAGSARGSPTRPNPPVRNLHQSGFSLSGTQVDEGVRSASKRIVAPPGGRSNITSLS

SEQ ID NO: 127 - protein, 555 aa, Homo sapiens
  misc_feature: ZNF415 isoform 1 protein
MDGDGLTFRDVAIEFSQDEWKCLNSTQRTLYRDVMLENYRNLVSLDLSRNCVIKELAPQQEGNPGEVFHTVTLEQHEKHDIEEFCFREIKKKIHDFDCQWRDDERNCNKVTTAPKENLTCRRDQRDRRGIGNKSIKHQLGLSFLPHPHELQQFQAEGKIYECNHVEKSVNHGSSVSPPQIISSTIKTHVSNKYGTDFICSSLLTQEQKSCIREKPYRYIECDKALNHGSHMTVRQVSHSGEKGYKCDLCGKVFSQKSNLARHWRVHTGEKPYKCNECDRSFSRNSCLALHRRVHTGEKPYKCYECDKVFSRNSCLALHQKTHIGEKPYTCKECGKAFSVRSTLTNHQVIHSGKKPYKCNECGKVFSQTSSLATHQRIHTGEKPYKCNECGKVFSQTSSLARHWRIHTGEKPYKCNECGKVFSYNSHLASHRRVHTGEKPYKCNECGKAFSVHSNLTTHQVIHTGEKPYKCNQCGKGFSVHSSLTTHQVIHTGEKPYKCNECGKSFSVRPNLTRHQIIHTGKKPYKCSDCGKSFSVRPNLFRHQIIHTKEKPYKRN

SEQ ID NO: 128 - protein, 555 aa, Homo sapiens
  misc_feature: ZNF415 isoform 2 protein
MAFTQLTFRDVAIEFSQDEWKCLNSTQRTLYRDVMLENYRNLVSLDLSRNCVIKELAPQQEGNPGEVFHTVTLEQHEKHDIEEFCFREIKKKIHDFDCQWRDDERNCNKVTTAPKENLTCRRDQRDRRGIGNKSIKHQLGLSFLPHPHELQQFQAEGKIYECNHVEKSVNHGSSVSPPQIISSTIKTHVSNKYGTDFICSSLLTQEQKSCIREKPYRYIECDKALNHGSHMTVRQVSHSGEKGYKCDLCGKVFSQKSNLARHWRVHTGEKPYKCNECDRSFSRNSCLALHRRVHTGEKPYKCYECDKVFSRNSCLALHQKTHIGEKPYTCKECGKAFSVRSTLTNHQVIHSGKKPYKCNECGKVFSQTSSLATHQRIHTGEKPYKCNECGKVFSQTSSLARHWRIHTGEKPYKCNECGKVFSYNSHLASHRRVHTGEKPYKCNECGKAFSVHSNLTTHQVIHTGEKPYKCNQCGKGFSVHSSLTTHQVIHTGEKPYKCNECGKSFSVRPNLTRHQIIHTGKKPYKCSDCGKSFSVRPNLFRHQIIHTKEKPYKRN

SEQ ID NO: 129 - protein, 603 aa, Homo sapiens
  misc_feature: ZNF415 isoform 3 protein
MPELYTEDFIQGCDVGELQEPGLPGVLSYVGAQERALDHRKPSTSSKKTKRVGMDQRCENRLECNGAISAHCNLRLPDSNDSPASASRVAGITDLSRNCVIKELAPQQEGNPGEVFHTVTLEQHEKHDIEEFCFREIKKKIHDFDCQWRDDERNCNKVTTAPKENLTCRRDQRDRRGIGNKSIKHQLGLSFLPHPHELQQFQAEGKIYECNHVEKSVNHGSSVSPPQIISSTIKTHVSNKYGTDFICSSLLTQEQKSCIREKPYRYIECDKALNHGSHMTVRQVSHSGEKGYKCDLCGKVFSQKSNLARHWRVHTGEKPYKCNECDRSFSRNSCLALHRRVHTGEKPYKCYECDKVFSRNSCLALHQKTHIGEKPYTCKECGKAFSVRSTLTNHQVIHSGKKPYKCNECGKVFSQTSSLATHQRIHTGEKPYKCNECGKVFSQTSSLARHWRIHTGEKPYKCNECGKVFSYNSHLASHRRVHTGEKPYKCNECGKAFSVHSNLTTHQVIHTGEKPYKCNQCGKGFSVHSSLTTHQVIHTGEKPYKCNECGKSFSVRPNLTRHQIIHTGKKPYKCSDCGKSFSVRPNLFRHQIIHTKEKPYKRN

SEQ ID NO: 130 - protein, 325 aa, Homo sapiens
  misc_feature: ZNF415 isoform 4 protein
MTVRQVSHSGEKGYKCDLCGKVFSQKSNLARHWRVHTGEKPYKCNECDRSFSRNSCLALHRRVHTGEKPYKCYECDKVFSRNSCLALHQKTHIGEKPYTCKECGKAFSVRSTLTNHQVIHSGKKPYKCNECGKVFSQTSSLATHQRIHTGEKPYKCNECGKVFSQTSSLARHWRIHTGEKPYKCNECGKVFSYNSHLASHRRVHTGEKPYKCNECGKAFSVHSNLTTHQVIHTGEKPYKCNQCGKGFSVHSSLTTHQVIHTGEKPYKCNECGKSFSVRPNLTRHQIIHTGKKPYKCSDCGKSFSVRPNLFRHQIIHTKEKPYKRN

SEQ ID NO: 131 - protein, 632 aa, Homo sapiens
  misc_feature: ZNF415 isoform 5 protein
MDGDGLTFRDVAIEFSQDEWKCLNSTQRTLYRDVMLENYRNLVSLEYYPMWEHRKEPWTIESQVRVARKPKGWEWIKGVKTDGVSLLLPRLECNGAISAHCNLRLPDSNDSPASASRVAGITDLSRNCVIKELAPQQEGNPGEVFHTVTLEQHEKHDIEEFCFREIKKKIHDFDCQWRDDERNCNKVTTAPKENLTCRRDQRDRRGIGNKSIKHQLGLSFLPHPHELQQFQAEGKIYECNHVEKSVNHGSSVSPPQIISSTIKTHVSNKYGTDFICSSLLTQEQKSCIREKPYRYIECDKALNHGSHMTVRQVSHSGEKGYKCDLCGKVFSQKSNLARHWRVHTGEKPYKCNECDRSFSRNSCLALHRRVHTGEKPYKCYECDKVFSRNSCLALHQKTHIGEKPYTCKECGKAFSVRSTLTNHQVIHSGKKPYKCNECGKVFSQTSSLATHQRIHTGEKPYKCNECGKVFSQTSSLARHWRIHTGEKPYKCNECGKVFSYNSHLASHRRVHTGEKPYKCNECGKAFSVHSNLTTHQVIHTGEKPYKCNQCGKGFSVHSSLTTHQVIHTGEKPYKCNECGKSFSVRPNLTRHQIIHTGKKPYKCSDCGKSFSVRPNLFRHQIIHTKEKPYKRN

SEQ ID NO: 132 - protein, 601 aa, Homo sapiens
  misc_feature: ZNF415 isoform 6 protein
MTPSLSLSEPTCNRDKGLDQKTSIIDFQRLLAHEEETQKRRAKESGMAFTQLTFRDVAIEFSQDEWKCLNSTQRTLYRDVMLENYRNLVSLDLSRNCVIKELAPQQEGNPGEVFHTVTLEQHEKHDIEEFCFREIKKKIHDFDCQWRDDERNCNKVTTAPKENLTCRRDQRDRRGIGNKSIKHQLGLSFLPHPHELQQFQAEGKIYECNHVEKSVNHGSSVSPPQIISSTIKTHVSNKYGTDFICSSLLTQEQKSCIREKPYRYIECDKALNHGSHMTVRQVSHSGEKGYKCDLCGKVFSQKSNLARHWRVHTGEKPYKCNECDRSFSRNSCLALHRRVHTGEKPYKCYECDKVFSRNSCLALHQKTHIGEKPYTCKECGKAFSVRSTLTNHQVIHSGKKPYKCNECGKVFSQTSSLATHQRIHTGEKPYKCNECGKVFSQTSSLARHWRIHTGEKPYKCNECGKVFSYNSHLASHRRVHTGEKPYKCNECGKAFSVHSNLTTHQVIHTGEKPYKCNQCGKGFSVHSSLTTHQVIHTGEKPYKCNECGKSFSVRPNLTRHQIIHTGKKPYKCSDCGKSFSVRPNLFRHQIIHTKEKPYKRN

SEQ ID NO: 133 - protein, 591 aa, Homo sapiens
  misc_feature: ZNF415 isoform 7 protein
MDGDGLTFRDVAIEFSQDEWKCLNSTQRTLYRDVMLENYRNLVSLEYYPMWEHRKEPWTIESQVRVARKPKGWEWIKGVKTDLSRNCVIKELAPQQEGNPGEVFHTVTLEQHEKHDIEEFCFREIKKKIHDFDCQWRDDERNCNKVTTAPKENLTCRRDQRDRRGIGNKSIKHQLGLSFLPHPHELQQFQAEGKIYECNHVEKSVNHGSSVSPPQIISSTIKTHVSNKYGTDFICSSLLTQEQKSCIREKPYRYIECDKALNHGSHMTVRQVSHSGEKGYKCDLCGKVFSQKSNLARHWRVHTGEKPYKCNECDRSFSRNSCLALHRRVHTGEKPYKCYECDKVFSRNSCLALHQKTHIGEKPYTCKECGKAFSVRSTLTNHQVIHSGKKPYKCNECGKVFSQTSSLATHQRIHTGEKPYKCNECGKVFSQTSSLARHWRIHTGEKPYKCNECGKVFSYNSHLASHRRVHTGEKPYKCNECGKAFSVHSNLTTHQVIHTGEKPYKCNQCGKGFSVHSSLTTHQVIHTGEKPYKCNECGKSFSVRPNLTRHQIIHTGKKPYKCSDCGKSFSVRPNLFRHQIIHTKEKPYKRN

SEQ ID NO: 134 - protein, 567 aa, Homo sapiens
  misc_feature: ZNF415 isoform 8 protein
MPELYTEDFIQGCDVGELQEPGLPGLECNGAISAHCNLRLPDSNDSPASASRVAGITDLSRNCVIKELAPQQEGNPGEVFHTVTLEQHEKHDIEEFCFREIKKKIHDFDCQWRDDERNCNKVTTAPKENLTCRRDQRDRRGIGNKSIKHQLGLSFLPHPHELQQFQAEGKIYECNHVEKSVNHGSSVSPPQIISSTIKTHVSNKYGTDFICSSLLTQEQKSCIREKPYRYIECDKALNHGSHMTVRQVSHSGEKGYKCDLCGKVFSQKSNLARHWRVHTGEKPYKCNECDRSFSRNSCLALHRRVHTGEKPYKCYECDKVFSRNSCLALHQKTHIGEKPYTCKECGKAFSVRSTLTNHQVIHSGKKPYKCNECGKVFSQTSSLATHQRIHTGEKPYKCNECGKVFSQTSSLARHWRIHTGEKPYKCNECGKVFSYNSHLASHRRVHTGEKPYKCNECGKAFSVHSNLTTHQVIHTGEKPYKCNQCGKGFSVHSSLTTHQVIHTGEKPYKCNECGKSFSVRPNLTRHQIIHTGKKPYKCSDCGKSFSVRPNLFRHQIIHTKEKPYKRN

SEQ ID NO: 135 - protein, 542 aa, Homo sapiens
  misc_feature: ZNF415 isoform 9 protein
MWEHRKEPWTIESQVRVARKPKGWEWIKGVKTDLSRNCVIKELAPQQEGNPGEVFHTVTLEQHEKHDIEEFCFREIKKKIHDFDCQWRDDERNCNKVTTAPKENLTCRRDQRDRRGIGNKSIKHQLGLSFLPHPHELQQFQAEGKIYECNHVEKSVNHGSSVSPPQIISSTIKTHVSNKYGTDFICSSLLTQEQKSCIREKPYRYIECDKALNHGSHMTVRQVSHSGEKGYKCDLCGKVFSQKSNLARHWRVHTGEKPYKCNECDRSFSRNSCLALHRRVHTGEKPYKCYECDKVFSRNSCLALHQKTHIGEKPYTCKECGKAFSVRSTLTNHQVIHSGKKPYKCNECGKVFSQTSSLATHQRIHTGEKPYKCNECGKVFSQTSSLARHWRIHTGEKPYKCNECGKVFSYNSHLASHRRVHTGEKPYKCNECGKAFSVHSNLTTHQVIHTGEKPYKCNQCGKGFSVHSSLTTHQVIHTGEKPYKCNECGKSFSVRPNLTRHQIIHTGKKPYKCSDCGKSFSVRPNLFRHQIIHTKEKPYKRN

SEQ ID NO: 136 - protein, 483 aa, Homo sapiens
  misc_feature: IRX5 isoform 1 protein
MSYPQGYLYQPSASLALYSCPAYSTSVISGPRTDELGRSSSGSAFSPYAGSTAFTAPSPGYNSHLQYGADPAAAAAAAFSSYVGSPYDHTPGMAGSLGYHPYAAPLGSYPYGDPAYRKNATRDATATLKAWLNEHRKNPYPTKGEKIMLAIITKMTLTQVSTWFANARRRLKKENKMTWTPRNRSEDEEEEENIDLEKNDEDEPQKPEDKGDPEGPEAGGAEQKAASGCERLQGPPTPAGKETEGSLSDSDFKEPPSEGRLDALQGPPRTGGPSPAGPAAARLAEDPAPHYPAGAPAPGPHPAAGEVPPGPGGPSVIHSPPPPPPPAVLAKPKLWSLAEIATSSDKVKDGGGGNEGSPCPPCPGPIAGQALGGSRASPAPAPSRSPSAQCPFPGGTVLSRPLYYTAPFYPGYTNYGSFGHLHGHPGPGPGPTTGPGSHFNGLNQTVLNRADALAKDPKMLRSQSQLDLCKDSPYELKKGMSDI

SEQ ID NO: 137 - protein, 482 aa, Homo sapiens
  misc_feature: IRX5 isoform 2 protein
MSYPQGYLYQPSASLALYSCPAYSTSVISGPRTDELGRSSSGSAFSPYAGSTAFTAPSPGYNSHLQYGADPAAAAAAAFSSYVGSPYDHTPGMAGSLGYHPYAAPLGSYPYGDPAYRKNATRDATATLKAWLNEHRKNPYPTKGEKIMLAIITKMTLTQVSTWFANARRRLKKENKMTWTPRNRSEDEEEEENIDLEKNDEDEPQKPEDKGDPEGPEAGAEQKAASGCERLQGPPTPAGKETEGSLSDSDFKEPPSEGRLDALQGPPRTGGPSPAGPAAARLAEDPAPHYPAGAPAPGPHPAAGEVPPGPGGPSVIHSPPPPPPPAVLAKPKLWSLAEIATSSDKVKDGGGGNEGSPCPPCPGPIAGQALGGSRASPAPAPSRSPSAQCPFPGGTVLSRPLYYTAPFYPGYTNYGSFGHLHGHPGPGPGPTTGPGSHFNGLNQTVLNRADALAKDPKMLRSQSQLDLCKDSPYELKKGMSDI

SEQ ID NO: 138 - protein, 1019 aa, Homo sapiens
  misc_feature: TMPRSS15 protein
MGSKRGISSRHHSLSSYEIMFAALFAILVVLCAGLIAVSCLTIKESQRGAALGQSHEARATFKITSGVTYNPNLQDKLSVDFKVLAFDLQQMIDEIFLSSNLKNEYKNSRVLQFENGSIIVVFDLFFAQWVSDENVKEELIQGLEANKSSQLVTFHIDLNSVDILDKLTTTSHLATPGNVSIECLPGSSPCTDALTCIKADLFCDGEVNCPDGSDEDNKMCATVCDGRFLLTGSSGSFQATHYPKPSETSVVCQWIIRVNQGLSIKLSFDDFNTYYTDILDIYEGVGSSKILRASIWETNPGTIRIFSNQVTATFLIESDESDYVGFNATYTAFNSSELNNYEKINCNFEDGFCFWVQDLNDDNEWERIQGSTFSPFTGPNFDHTFGNASGFYISTPTGPGGRQERVGLLSLPLDPTLEPACLSFWYHMYGENVHKLSINISNDQNMEKTVFQKEGNYGDNWNYGQVTLNETVKFKVAFNAFKNKILSDIALDDISLTYGICNGSLYPEPTLVPTPPPELPTDCGGPFELWEPNTTFSSTNFPNSYPNLAFCVWILNAQKGKNIQLHFQEFDLENINDVVEIRDGEEADSLLLAVYTGPGPVKDVFSTTNRMTVLLITNDVLARGGFKANFTTGYHLGIPEPCKADHFQCKNGECVPLVNLCDGHLHCEDGSDEADCVRFFNGTTNNNGLVRFRIQSIWHTACAENWTTQISNDVCQLLGLGSGNSSKPIFSTDGGPFVKLNTAPDGHLILTPSQQCLQDSLIRLQCNHKSCGKKLAAQDITPKIVGGSNAKEGAWPWVVGLYYGGRLLCGASLVSSDWLVSAAHCVYGRNLEPSKWTAILGLHMKSNLTSPQTVPRLIDEIVINPHYNRRRKDNDIAMMHLEFKVNYTDYIQPICLPEENQVFPPGRNCSIAGWGTVVYQGTTANILQEADVPLLSNERCQQQMPEYNITENMICAGYEEGGIDSCQGDSGGPLMCQENNRWFLAGVTSFGYKCALPNRPGVYARVSRFTEWIQSFLH

SEQ ID NO: 139 - protein, 378 aa, Homo sapiens
  misc_feature: IL3RA isoform 1 protein
MVLLWLTLLLIALPCLLQTKEDPNPPITNLRMKAKAQQLTWDLNRNVTDIECVKDADYSMPAVNNSYCQFGAISLCEVTNYTVRVANPPFSTWILFPENSGKPWAGAENLTCWIHDVDFLSCSWAVGPGAPADVQYDLYLNVANRRQQYECLHYKTDAQGTRIGCRFDDISRLSSGSQSSHILVRGRSAAFGIPCTDKFVVFSQIEILTPPNMTAKCNKTHSFMHWKMRSHFNRKFRYELQIQKRMQPVITEQVRDRTSFQLLNPGTYTVQIRARERVYEFLSAWSTPQRFECDQEEGANTRAWRTSLLIALGTLLALVCVFVICRRYLVMQRLFPRIPHMKDPIGDSFQNDKLVVWEAGKAGLEECLVTEVQVVQKT

SEQ ID NO: 140 - protein, 300 aa, Homo sapiens
  misc_feature: IL3RA isoform 2 protein
MVLLWLTLLLIALPCLLQTKEGGKPWAGAENLTCWIHDVDFLSCSWAVGPGAPADVQYDLYLNVANRRQQYECLHYKTDAQGTRIGCRFDDISRLSSGSQSSHILVRGRSAAFGIPCTDKFVVFSQIEILTPPNMTAKCNKTHSFMHWKMRSHFNRKFRYELQIQKRMQPVITEQVRDRTSFQLLNPGTYTVQIRARERVYEFLSAWSTPQRFECDQEEGANTRAWRTSLLIALGTLLALVCVFVICRRYLVMQRLFPRIPHMKDPIGDSFQNDKLVVWEAGKAGLEECLVTEVQVVQKT

SEQ ID NO: 141 - protein, 438 aa, Homo sapiens
  misc_feature: IGF2BP1 isoform 1 protein
MNKLYIGNLNESVTPADLEKVFAEHKISYSGQFLVKSGYAFVDCPDEHWAMKAIETFSGKVELQGKRLEIEHSVPKKQRSRKIQIRNIPPQLRWEVLDSLLAQYGTVENCEQVNTESETAVVNVTYSNREQTRQADEVPLKILAHNNFVGRLIGKEGRNLKKVEQDTETKITISSLQDLTLYNPERTITVKGAIENCCRAEQEIMKKVREAYENDVAAMSLQSHLIPGLNLAAVGLFPASSSAVPPPPSSVTGAAPYSSFMQAPEQEMVQVFIPAQAVGAIIGKKGQHIKQLSRFASASIKIAPPETPDSKVRMVIITGPPEAQFKAQGRIYGKLKEENFFGPKEEVKLETHIRVPASAAGRVIGKGGKTVNELQNLTAAEVVVPRDQTPDENDQVIVKIIGHFYASQMAQRKIRDILAQVKQQHQKGQSNQAQARRK

SEQ ID NO: 142 - protein, 577 aa, Homo sapiens
  misc_feature: IGF2BP1 isoform 2 protein
MNKLYIGNLNESVTPADLEKVFAEHKISYSGQFLVKSGYAFVDCPDEHWAMKAIETFSGKVELQGKRLEIEHSVPKKQRSRKIQIRNIPPQLRWEVLDSLLAQYGTVENCEQVNTESETAVVNVTYSNREQTRQAIMKLNGHQLENHALKVSYIPDEQIAQGPENGRRGGFGSRGQPRQGSPVAAGAPAKQQQVDIPLRLLVPTQYVGAIIGKEGATIRNITKQTQSKIDVHRKENAGAAEKAISVHSTPEGCSSACKMILEIMHKEAKDTKTADEVPLKILAHNNFVGRLIGKEGRNLKKVEQDTETKITISSLQDLTLYNPERTITVKGAIENCCRAEQEIMKKVREAYENDVAAMSLQSHLIPGLNLAAVGLFPASSSAVPPPPSSVTGAAPYSSFMQAPEQEMVQVFIPAQAVGAIIGKKGQHIKQLSRFASASIKIAPPETPDSKVRMVIITGPPEAQFKAQGRIYGKLKEENFFGPKEEVKLETHIRVPASAAGRVIGKGGKTVNELQNLTAAEVVVPRDQTPDENDQVIVKIIGHFYASQMAQRKIRDILAQVKQQHQKGQSNQAQARRK

SEQ ID NO: 143 - DNA, 4578 bp, Homo sapiens
  misc_feature: PCDHGB5 isoform 1 mRNA
atggggagcggcgccggggagctgggccgggctgagaggctgccagtgctctttctcttcctgctgtctttgttctgcccggcgctctgtgagcagatccgctacaggattcccgaggaaatgcccaagggctccgtagtggggaacctcgccacggacctggggttcagcgtccaggagttaccgactcgaaaactgcgcgtcagttcggagaagccttacttcaccgtgagcgcagagagcggggagttgcttgtgagcagcaggctagacagggaggagatatgcgggaagaagccagcttgtgctctggaatttgaggctgttgctgaaaatccactgaacttttatcacgtgaatgtggagatcgaggacattaatgaccacacgccaaaattcacgcaaaattcctttgagctgcaaataagtgagtctgcacagcctggcacaagatttatactagaagtagcagaagatgcagatattggcttaaactctctgcagaagtataaactctctcttaacccaagtttctcattaataattaaggagaaacaggatggtagtaaatacccggaactggcactggagaaaaccttagaccgggaacaacagagttaccatcgtttagtcctgactgccttggacggtggacatccacccctaagcggcaccactgagctccggatccaggtaaccgacgccaatgataatcccccggtattcaaccgagacgtgtacagagtcagccttcgggaaaacgtgccaccaggcaccactgtgttgcaagtgtcagccactgaccaagacgagggcatcaactcagaaattacttattccttctacagaaccgggcaaatctttagtctgaattcaaagagcggagaaattaccactcaaaagaaactggattttgaagagaccaaggaatattcaatggttgtagaagggagggatggtggtggactggttgcacaatgtacagttgaaattaatattcaagatgaaaatgacaatagcccagaagttacattccattctctacttgaaatgattctggaaaacgcggtgcctggaacactaattgctttgatcaaaatacatgaccaagattctggggaaaatggggaggttaattgtcaattacaaggcgaagtcccttttaagattatctcttcatccaaaaattcgtataagttggtaacagatggaaccctagaccgagagcaaaccccggagtacaatgtcaccatcacagccacagacaggggcaagccgcccctctcctccagcataagcgtcatcctacatatcagagacgtcaacgataacgctccggttttccaccaggcgtcctacttagtcagtgtacccgaaaacaaccctcctggggcctccatcgcgcaagtctgcgcctcggacctggacttggggttgaacggccaagtctcctactctatcatggccagcgacctagagcctctggcactggcctcttacgtgtccatgagcgcgcaaagtggggtggtgttcgcgcagcgcgcctttgactacgagcagctgcgcaccttcgaactcacactacaggcccgcgaccagggctcgcctgcgctcagcgcaaacgtgagcctgcgcgtgttggtgggcgaccgaaacgacaacgcaccgcgggtgctgtaccccgcgctgggtcccgacggctctgcgctcttcgatatggtgccgcgcgctgcagagcccggctacctggtgaccaaggtagtggccgtggacgcagactcaggacacaacgcctggctgtcctaccacgtgctgcaggctagcgagcccgggctcttcagcctggggctgcgcacaggagaggtgcgcacagcgcgtgccttgggcgacagggacgcggcccgccagcgcctgctggttgctgtgcgtgatggtggacagccgccactctccgccaccgccacgctgcacttggtctttgctgacagcttgcaggaggtgctgccggatatcactgaccgccctgtaccctctgacccccaggctgagctgcagttttacctagtggtggccttggccttgatctcagtgctcttcctcctggccgtgattctggccgttgccttgcgcctgcgacgctcctccagccctgccgcctggagctgcttccaacctggtctctgtgtcaagtctggacctgtggttccccccaactacagtcaggggactttgccttattcctacaacctatgtgttgcacatacaggaaagacggagtttaatttcctaaaatgtagtgagcaattgagttcaggacaagacatactttgtggtgattcatctggggccttatttccactttgtaattccagcgagtcgacttcccatcctgagttgcaagccccgcccaacacggactggcgtttctctcaggcccagagacccggcaccagcggctcccaaaatggcgatgacaccggcacctggcccaacaaccagtttgacacagagatgctgcaagccatgatcttggcgtccgccagtgaagctgctgatgggagctccaccctgggagggggtgccggcaccatgggattgagcgcccgctacggaccccagttcaccctgcagcacgtgcccgactaccgccagaatgtctacatcccaggcagcaatgccacactgaccaacgcagctggcaagcgggatggcaaggccccagcaggtggcaatggcaacaagaagaagtcgggcaagaaggagaagaagtaacatggaggccaggccaagagccacagggcggcctctccccaaccagcccagcttctccttacctgcacccaggcctcagagtttcagggctaacccccagaatactggtaggggccaaggccatgctccccttgggaaacagaaacaagtgcccagtcagcacctaccccttcccccccagggggttgaatatgcaaaagcagttccgctgggaacccccatccaatcaactgctgtacccatgggggtagtggggttactgtagacaccaagaaccatttgccacaccccgtttagttacagctgaactcctccatcttccaaatcaatcaggcccatccatcccatgcctccctcctccccaccccactccaacagttcctctttcccgagtaaggtggttggggtgttgaagtaccaagtaacctacaagcctcctagttctgaaaagttggaagggcatcatgacctcttggcctctcctttgattctcaatcttcccccaaagcatggtttggtgccagccccttcacctccttccagagcccaagatcaatgctcaagttttggaggacatgatcaccatccccatggtactgatgcttgctggatttagggagggcattttgctaccaagcctcttcccaacgccctggggaccagtcttctgttttgtttttcattgtttgacgtttccactgcatgccttgacttcccccacctcctcctcaaacaagagactccactgcatgttccaagacagtatggggtggtaagataaggaagggaagtgtgtggatgtggatggtgggggcatggacaaagcttgacacatcaagttatcaaggccttggaggaggctctgtatgtcctcaggggactgacaacatcctccagattccagccataaaccaataactaggctggacccttcccactacataatagggctcagcccaggcagccagctttgggctgagctaacaggaccaatggattaaactggcatttcagtccaaggaagctcgaagcaggtttaggaccaggtccccttgagaggtcagaggggcctctgtgggtgctgggtactccagaggtgccactggtggaagggtcagcggagccccagcaggaagggtgggccagccaggccattcttagtccctgggttggggaggcagggagctagggcagggaccaaatgaacagaaagtctcagcccaggatggggcttcttcaacagggcccctgccctcctgaagcctcagtccttcaccttgccaggtgccgtttctcttccgtgaaggccactgcccaggtccccagtgcgccccctagtggccatagcctggttaaagttccccagtgcctccttgtgcatagaccttcttctcccacccccttctgcccctgggtccccggccatccagcggggctgccagagaaccccagacctgcccttacagtagtgtagcgccccctccctctttcggctggtgtagaatagccagtagtgtagtgcggtgtgcttttacgtgatggcgggtgggcagcgggcggcgggctccgcgcagccgtctgtccttgatctgcccgcggcggcccgtgttgtgttttgtgctgtgtccacgcgctaaggcgaccccctcccccgtactgacttctcctataagcgcttctcttcgcatagtcacgtagctcccaccccaccctcttcctgtgtctcacgcaagttttatactctaatatttatatggctttttttcttcgacaaaaaaataataaaacgtttcttctgaaaagctg

SEQ ID NO: 144 - DNA, 2457 bp, Homo sapiens
  misc_feature: PCDHGB5 Isoform 2 mRNA
atggggagcggcgccggggagctgggccgggctgagaggctgccagtgctctttctcttcctgctgtctttgttctgcccggcgctctgtgagcagatccgctacaggattcccgaggaaatgcccaagggctccgtagtggggaacctcgccacggacctggggttcagcgtccaggagttaccgactcgaaaactgcgcgtcagttcggagaagccttacttcaccgtgagcgcagagagcggggagttgcttgtgagcagcaggctagacagggaggagatatgcgggaagaagccagcttgtgctctggaatttgaggctgttgctgaaaatccactgaacttttatcacgtgaatgtggagatcgaggacattaatgaccacacgccaaaattcacgcaaaattcctttgagctgcaaataagtgagtctgcacagcctggcacaagatttatactagaagtagcagaagatgcagatattggcttaaactctctgcagaagtataaactctctcttaacccaagtttctcattaataattaaggagaaacaggatggtagtaaatacccggaactggcactggagaaaaccttagaccgggaacaacagagttaccatcgtttagtcctgactgccttggacggtggacatccacccctaagcggcaccactgagctccggatccaggtaaccgacgccaatgataatcccccggtattcaaccgagacgtgtacagagtcagccttcgggaaaacgtgccaccaggcaccactgtgttgcaagtgtcagccactgaccaagacgagggcatcaactcagaaattacttattccttctacagaaccgggcaaatctttagtctgaattcaaagagcggagaaattaccactcaaaagaaactggattttgaagagaccaaggaatattcaatggttgtagaagggagggatggtggtggactggttgcacaatgtacagttgaaattaatattcaagatgaaaatgacaatagcccagaagttacattccattctctacttgaaatgattctggaaaacgcggtgcctggaacactaattgctttgatcaaaatacatgaccaagattctggggaaaatggggaggttaattgtcaattacaaggcgaagtcccttttaagattatctcttcatccaaaaattcgtataagttggtaacagatggaaccctagaccgagagcaaaccccggagtacaatgtcaccatcacagccacagacaggggcaagccgcccctctcctccagcataagcgtcatcctacatatcagagacgtcaacgataacgctccggttttccaccaggcgtcctacttagtcagtgtacccgaaaacaaccctcctggggcctccatcgcgcaagtctgcgcctcggacctggacttggggttgaacggccaagtctcctactctatcatggccagcgacctagagcctctggcactggcctcttacgtgtccatgagcgcgcaaagtggggtggtgttcgcgcagcgcgcctttgactacgagcagctgcgcaccttcgaactcacactacaggcccgcgaccagggctcgcctgcgctcagcgcaaacgtgagcctgcgcgtgttggtgggcgaccgaaacgacaacgcaccgcgggtgctgtaccccgcgctgggtcccgacggctctgcgctcttcgatatggtgccgcgcgctgcagagcccggctacctggtgaccaaggtagtggccgtggacgcagactcaggacacaacgcctggctgtcctaccacgtgctgcaggctagcgagcccgggctcttcagcctggggctgcgcacaggagaggtgcgcacagcgcgtgccttgggcgacagggacgcggcccgccagcgcctgctggttgctgtgcgtgatggtggacagccgccactctccgccaccgccacgctgcacttggtctttgctgacagcttgcaggaggtgctgccggatatcactgaccgccctgtaccctctgacccccaggctgagctgcagttttacctagtggtggccttggccttgatctcagtgctcttcctcctggccgtgattctggccgttgccttgcgcctgcgacgctcctccagccctgccgcctggagctgcttccaacctggtctctgtgtcaagtctggacctgtggttccccccaactacagtcaggggactttgccttattcctacaacctatgtgttgcacatacaggaaagacggagtttaatttcctaaaatgtagtgagcaattgagttcaggacaagacatactttgtggtgattcatctggggccttatttccactttgtaattccagcgagtcgacttcccatcctgagttggtgagtttcatttatgtctattctttttcattacccacccaattttctgtatttacatga

SEQ ID NO: 145 - protein, 923 aa, Homo sapiens
  misc_feature: PCDHGB5 isoform 1 Protein
MGSGAGELGRAERLPVLFLFLLSLFCPALCEQIRYRIPEEMPKGSVVGNLATDLGFSVQELPTRKLRVSSEKPYFTVSAESGELLVSSRLDREEICGKKPACALEFEAVAENPLNFYHVNVEIEDINDHTPKFTQNSFELQISESAQPGTRFILEVAEDADIGLNSLQKYKLSLNPSFSLIIKEKQDGSKYPELALEKTLDREQQSYHRLVLTALDGGHPPLSGTTELRIQVTDANDNPPVFNRDVYRVSLRENVPPGTTVLQVSATDQDEGINSEITYSFYRTGQIFSLNSKSGEITTQKKLDFEETKEYSMVVEGRDGGGLVAQCTVEINIQDENDNSPEVTFHSLLEMILENAVPGTLIALIKIHDQDSGENGEVNCQLQGEVPFKIISSSKNSYKLVTDGTLDREQTPEYNVTITATDRGKPPLSSSISVILHIRDVNDNAPVFHQASYLVSVPENNPPGASIAQVCASDLDLGLNGQVSYSIMASDLEPLALASYVSMSAQSGVVFAQRAFDYEQLRTFELTLQARDQGSPALSANVSLRVLVGDRNDNAPRVLYPALGPDGSALFDMVPRAAEPGYLVTKVVAVDADSGHNAWLSYHVLQASEPGLFSLGLRTGEVRTARALGDRDAARQRLLVAVRDGGQPPLSATATLHLVFADSLQEVLPDITDRPVPSDPQAELQFYLVVALALISVLFLLAVILAVALRLRRSSSPAAWSCFQPGLCVKSGPVVPPNYSQGTLPYSYNLCVAHTGKTEFNFLKCSEQLSSGQDILCGDSSGALFPLCNSSESTSHPELQAPPNTDWRFSQAQRPGTSGSQNGDDTGTWPNNQFDTEMLQAMILASASEAADGSSTLGGGAGTMGLSARYGPQFTLQHVPDYRQNVYIPGSNATLTNAAGKRDGKAPAGGNGNKKKSGKKEKK

SEQ ID NO: 146 - protein, 818 aa, Homo sapiens
  misc_feature: PCDHGB5 Isoform 2 Protein
MGSGAGELGRAERLPVLFLFLLSLFCPALCEQIRYRIPEEMPKGSVVGNLATDLGFSVQELPTRKLRVSSEKPYFTVSAESGELLVSSRLDREEICGKKPACALEFEAVAENPLNFYHVNVEIEDINDHTPKFTQNSFELQISESAQPGTRFILEVAEDADIGLNSLQKYKLSLNPSFSLIIKEKQDGSKYPELALEKTLDREQQSYHRLVLTALDGGHPPLSGTTELRIQVTDANDNPPVFNRDVYRVSLRENVPPGTTVLQVSATDQDEGINSEITYSFYRTGQIFSLNSKSGEITTQKKLDFEETKEYSMVVEGRDGGGLVAQCTVEINIQDENDNSPEVTFHSLLEMILENAVPGTLIALIKIHDQDSGENGEVNCQLQGEVPFKIISSSKNSYKLVTDGTLDREQTPEYNVTITATDRGKPPLSSSISVILHIRDVNDNAPVFHQASYLVSVPENNPPGASIAQVCASDLDLGLNGQVSYSIMASDLEPLALASYVSMSAQSGVVFAQRAFDYEQLRTFELTLQARDQGSPALSANVSLRVLVGDRNDNAPRVLYPALGPDGSALFDMVPRAAEPGYLVTKVVAVDADSGHNAWLSYHVLQASEPGLFSLGLRTGEVRTARALGDRDAARQRLLVAVRDGGQPPLSATATLHLVFADSLQEVLPDITDRPVPSDPQAELQFYLVVALALISVLFLLAVILAVALRLRRSSSPAAWSCFQPGLCVKSGPVVPPNYSQGTLPYSYNLCVAHTGKTEFNFLKCSEQLSSGQDILCGDSSGALFPLCNSSESTSHPELVSFIYVYSFSLPTQFSVFT

SEQ ID NO: 147 - protein, 12 aa, Homo sapiens
  misc_feature: spacer (IgG4hinge) (aa)Homo sapiens
ESKYGPPCPPCP

SEQ ID NO: 148 - DNA, 36 bp, Homo sapiens
  misc_feature: spacer (IgG4hinge) (nt)homo sapiens
gaatctaagtacggaccgccctgccccccttgccct

SEQ ID NO: 149 - protein, 119 aa, Homo sapiens
  misc_feature: Hinge-CH3 spacer Homo sapiens
ESKYGPPCPPCPGQPREPQVYTLPPSQEEMTKNQVSLTCLVKGFYPSDIAVEWESNGQPENNYKTTPPVLDSDGSFFLYSRLTVDKSRWQEGNVFSCSVMHEALHNHYTQKSLSLSLGK

SEQ ID NO: 150 - protein, 229 aa, Homo sapiens
  misc_feature: Hinge-CH2-CH3 spacer Homo sapiens
ESKYGPPCPPCPAPEFLGGPSVFLFPPKPKDTLMISRTPEVTCVVVDVSQEDPEVQFNWYVDGVEVHNAKTKPREEQFNSTYRVVSVLTVLHQDWLNGKEYKCKVSNKGLPSSIEKTISKAKGQPREPQVYTLPPSQEEMTKNQVSLTCLVKGFYPSDIAVEWESNGQPENNYKTTPPVLDSDGSFFLYSRLTVDKSRWQEGNVFSCSVMHEALHNHYTQKSLSLSLGK

SEQ ID NO: 151 - protein, 282 aa, Homo sapiens
  misc_feature: IgD-hinge-Fc Homo sapiens
RWPESPKAQASSVPTAQPQAEGSLAKATTAPATTRNTGRGGEEKKKEKEKEEQEERETKTPECPSHTQPLGVYLLTPAVQDLWLRDKATFTCFVVGSDLKDAHLTWEVAGKVPTGGVEEGLLERHSNGSQSQHSRLTLPRSLWNAGTSVTCTLNHPSLPPQRLMALREPAAQAPVKLSLNLLASSDPPEAASWLLCEVSGFSPPNILLMWLEDQREVNTSGFAPARPPPQPGSTTFWAWSVLRVPAPPSPQPATYTCVVSHEDSRTLLNASRSLEVSYVTDH

SEQ ID NO: 152 - protein, 24 aa, Artificial Sequence
  T2A sequence
  misc_feature: T2A artificial
LEGGGEGRGSLLTCGDVEENPGPR

SEQ ID NO: 153 - protein, 357 aa, Artificial Sequence
  Truncated EGFR
  misc_feature: tEGFR artificial
MLLLVTSLLLCELPHPAFLLIPRKVCNGIGIGEFKDSLSINATNIKHFKNCTSISGDLHILPVAFRGDSFTHTPPLDPQELDILKTVKEITGFLLIQAWPENRTDLHAFENLEIIRGRTKQHGQFSLAVVSLNITSLGLRSLKEISDGDVIISGNKNLCYANTINWKKLFGTSGQKTKIISNRGENSCKATGQVCHALCSPEGCWGPEPRDCVSCRNVSRGRECVDKCNLLEGEPREFVENSECIQCHPECLPQAMNITCTGRGPDNCIQCAHYIDGPHCVKTCPAGVMGENNTLVWKYADAGHVCHLCHPNCTYGCTGPGLEGCPTNGPKIPSIATGMVGALLLLLVVALGIGLFM

SEQ ID NO: 154 - protein, 27 aa, Homo sapiens
  misc_feature: CD28 (amino acids 153-179 of Accession No. P10747) Homo sapiens
FWVLVVVGGVLACYSLLVTVAFIIFWV

SEQ ID NO: 155 - protein, 66 aa, Homo sapiens
  misc_feature: CD28 (amino acids 114-179 of Accession No. P10747) Homo sapiens
IEVMYPPPYLDNEKSNGTIIHVKGKHLCPSPLFPGPSKPFWVLVVVGGVLACYSLLVTVAFIIFWV

SEQ ID NO: 156 - protein, 41 aa, Homo sapiens
  misc_feature: CD28 (amino acids 180-220 of P10747) Homo sapiens
RSKRSRLLHSDYMNMTPRRPGPTRKHYQPYAPPRDFAAYRS

SEQ ID NO: 157 - protein, 41 aa, Homo sapiens
  misc_feature: CD28 (LL to GG) Homo sapiens
RSKRSRGGHSDYMNMTPRRPGPTRKHYQPYAPPRDFAAYRS

SEQ ID NO: 158 - protein, 42 aa, Homo sapiens
  misc_feature: 4-1BB (amino acids 214-255 of Q07011.1) Homo sapiens
KRGRKKLLYIFKQPFMRPVQTTQEEDGCSCRFPEEEEGGCEL

SEQ ID NO: 159 - protein, 112 aa, Homo sapiens
  misc_feature: CD3 zeta Homo sapiens
RVKFSRSADAPAYQQGQNQLYNELNLGRREEYDVLDKRRGRDPEMGGKPRRKNPQEGLYNELQKDKMAEAYSEIGMKGERRRGKGHDGLYQGLSTATKDTYDALHMQALPPR

SEQ ID NO: 160 - protein, 112 aa, Homo sapiens
  misc_feature: CD3 zeta Homo sapiens
RVKFSRSAEPPAYQQGQNQLYNELNLGRREEYDVLDKRRGRDPEMGGKPRRKNPQEGLYNELQKDKMAEAYSEIGMKGERRRGKGHDGLYQGLSTATKDTYDALHMQALPPR

SEQ ID NO: 161 - protein, 112 aa, Homo sapiens
  misc_feature: CD3 zeta Homo sapiens
RVKFSRSADAPAYKQGQNQLYNELNLGRREEYDVLDKRRGRDPEMGGKPRRKNPQEGLYNELQKDKMAEAYSEIGMKGERRRGKGHDGLYQGLSTATKDTYDALHMQALPPR

SEQ ID NO: 162 - protein, 335 aa, Artificial Sequence
  Truncated EGFR
  misc_feature: tEGFR artificial
RKVCNGIGIGEFKDSLSINATNIKHFKNCTSISGDLHILPVAFRGDSFTHTPPLDPQELDILKTVKEITGFLLIQAWPENRTDLHAFENLEIIRGRTKQHGQFSLAVVSLNITSLGLRSLKEISDGDVIISGNKNLCYANTINWKKLFGTSGQKTKIISNRGENSCKATGQVCHALCSPEGCWGPEPRDCVSCRNVSRGRECVDKCNLLEGEPREFVENSECIQCHPECLPQAMNITCTGRGPDNCIQCAHYIDGPHCVKTCPAGVMGENNTLVWKYADAGHVCHLCHPNCTYGCTGPGLEGCPTNGPKIPSIATGMVGALLLLLVVALGIGLFM

SEQ ID NO: 163 - protein, 18 aa, Artificial Sequence
  T2A Sequence
  misc_feature: 2A element T2A
EGRGSLLTCGDVEENPGP

SEQ ID NO: 164 - protein, 22 aa, Artificial Sequence
  P2A
  misc_feature: 2A element P2A
GSGATNFSLLKQAGDVEENPGP

SEQ ID NO: 165 - protein, 19 aa, Artificial Sequence
  P2A
  misc_feature: 2A element P2A
ATNFSLLKQAGDVEENPGP

SEQ ID NO: 166 - protein, 20 aa, Artificial Sequence
  E2A
  misc_feature: 2A element E2A
QCTNYALLKLAGDVESNPGP

SEQ ID NO: 167 - protein, 22 aa, Artificial Sequence
  F2A
  misc_feature: 2A element F2A
VKQTLNFDLLKLAGDVESNPGP

SEQ ID NO: 168 - protein, 30 aa, Artificial Sequence
  Linker
  misc_feature: Exemplary linker sequence
PGGGSGGGGSGGGGSGGGGSGGGGSGGGGP

SEQ ID NO: 169 - protein, 17 aa, Artificial Sequence
  Linker
  misc_feature: Exemplary linker sequence
GSADDAKKDAAKKDGKS

SEQ ID NO: 170 - protein, 18 aa, Artificial Sequence
  Linker
  misc_feature: Exemplary linker sequence
GSTSGSGKPGSGEGSTKG

SEQ ID NO: 171 - protein, 5 aa, Artificial Sequence
  Linker
  misc_feature: Exemplary linker sequence
  VARIANT (1)..(1): is gly, cys, or arg
  VARIANT (4)..(4): is cys or thr
XPPXP

SEQ ID NO: 172 - protein, 15 aa, Homo sapiens
  misc_feature: Exemplary spacer derived from Ig hinge
EPKSCDKTHTCPPCP

SEQ ID NO: 173 - protein, 12 aa, Homo sapiens
  misc_feature: Exemplary spacer derived from Ig hinge
ERKCCVECPPCP

SEQ ID NO: 174 - protein, 61 aa, Homo sapiens
  misc_feature: Exemplary spacer derived from Ig hinge
ELKTPLGDTHTCPRCPEPKSCDTPPPCPRCPEPKSCDTPPPCPRCPEPKSCDTPPPCPRCP

SEQ ID NO: 175 - protein, 12 aa, Homo sapiens
  misc_feature: Exemplary spacer derived from Ig hinge
ESKYGPPCPSCP

SEQ ID NO: 176 - protein, 12 aa, Homo sapiens
  misc_feature: Exemplary spacer derived from Ig hinge
ESKYGPPCPPCP

SEQ ID NO: 177 - protein, 9 aa, Homo sapiens
  misc_feature: Exemplary spacer derived from Ig hinge
YGPPCPPCP

SEQ ID NO: 178 - protein, 10 aa, Homo sapiens
  misc_feature: Exemplary spacer derived from Ig hinge
KYGPPCPPCP

SEQ ID NO: 179 - protein, 14 aa, Homo sapiens
  misc_feature: Exemplary spacer derived from Ig hinge
EVVVKYGPPCPPCP

SEQ ID NO: 180 - protein, 9 aa, Artificial Sequence
  FMC63 LC-CDR3
QQGNTLPYT

SEQ ID NO: 181 - protein, 11 aa, Artificial Sequence
  FMC63 CDR L1
RASQDISKYLN

SEQ ID NO: 182 - protein, 7 aa, Artificial Sequence
  FMC63 CDR L2
SRLHSGV

SEQ ID NO: 183 - protein, 9 aa, Artificial Sequence
  FMC63 CDR L3
GNTLPYTFG

SEQ ID NO: 184 - protein, 5 aa, Artificial Sequence
  FMC63 CDR H1
DYGVS

SEQ ID NO: 185 - protein, 16 aa, Artificial Sequence
  FMC63 CDR H2
VIWGSETTYYNSALKS

SEQ ID NO: 186 - protein, 7 aa, Artificial Sequence
  FMC63 CDR H3
YAMDYWG

SEQ ID NO: 187 - protein, 120 aa, Artificial Sequence
  FMC63 VH
EVKLQESGPGLVAPSQSLSVTCTVSGVSLPDYGVSWIRQPPRKGLEWLGVIWGSETTYYNSALKSRLTIIKDNSKSQVFLKMNSLQTDDTAIYYCAKHYYYGGSYAMDYWGQGTSVTVSS

SEQ ID NO: 188 - protein, 107 aa, Artificial Sequence
  FMC63 VL
DIQMTQTTSSLSASLGDRVTISCRASQDISKYLNWYQQKPDGTVKLLIYHTSRLHSGVPSRFSGSGSGTDYSLTISNLEQEDIATYFCQQGNTLPYTFGGGTKLEIT

SEQ ID NO: 189 - protein, 245 aa, Artificial Sequence
  FMC63 scFv
DIQMTQTTSSLSASLGDRVTISCRASQDISKYLNWYQQKPDGTVKLLIYHTSRLHSGVPSRFSGSGSGTDYSLTISNLEQEDIATYFCQQGNTLPYTFGGGTKLEITGSTSGSGKPGSGEGSTKGEVKLQESGPGLVAPSQSLSVTCTVSGVSLPDYGVSWIRQPPRKGLEWLGVIWGSETTYYNSALKSRLTIIKDNSKSQVFLKMNSLQTDDTAIYYCAKHYYYGGSYAMDYWGQGTSVTVSS

SEQ ID NO: 190 - protein, 11 aa, Artificial Sequence
  SJ25C1 CDR L1
KASQNVGTNVA

SEQ ID NO: 191 - protein, 7 aa, Artificial Sequence
  SJ25C1 CDR L2
SATYRNS

SEQ ID NO: 192 - protein, 9 aa, Artificial Sequence
  SJ25C1 CDR L3
QQYNRYPYT

SEQ ID NO: 193 - protein, 5 aa, Artificial Sequence
  SJ25C1 CDR H1
SYWMN

SEQ ID NO: 194 - protein, 17 aa, Artificial Sequence
  SJ25C1 CDR H2
QIYPGDGDTNYNGKFKG

SEQ ID NO: 195 - protein, 13 aa, Artificial Sequence
  SJ25C1 CDR H3
KTISSVVDFYFDY

SEQ ID NO: 196 - protein, 122 aa, Artificial Sequence
  SJ25C1 VH
EVKLQQSGAELVRPGSSVKISCKASGYAFSSYWMNWVKQRPGQGLEWIGQIYPGDGDTNYNGKFKGQATLTADKSSSTAYMQLSGLTSEDSAVYFCARKTISSVVDFYFDYWGQGTTVTVSS

SEQ ID NO: 197 - protein, 108 aa, Artificial Sequence
  SJ25C1 VL
DIELTQSPKFMSTSVGDRVSVTCKASQNVGTNVAWYQQKPGQSPKPLIYSATYRNSGVPDRFTGSGSGTDFTLTITNVQSKDLADYFCQQYNRYPYTSGGGTKLEIKR

SEQ ID NO: 198 - protein, 15 aa, Artificial Sequence
  Linker
GGGGSGGGGSGGGGS

SEQ ID NO: 199 - protein, 245 aa, Artificial Sequence
  SJ25C1 scFv
EVKLQQSGAELVRPGSSVKISCKASGYAFSSYWMNWVKQRPGQGLEWIGQIYPGDGDTNYNGKFKGQATLTADKSSSTAYMQLSGLTSEDSAVYFCARKTISSVVDFYFDYWGQGTTVTVSSGGGGSGGGGSGGGGSDIELTQSPKFMSTSVGDRVSVTCKASQNVGTNVAWYQQKPGQSPKPLIYSATYRNSGVPDRFTGSGSGTDFTLTITNVQSKDLADYFCQQYNRYPYTSGGGTKLEIKR

SEQ ID NO: 200 - protein, 12 aa, Artificial Sequence
  FMC63 HC-CDR3
HYYYGGSYAMDY

SEQ ID NO: 201 - protein, 7 aa, Artificial Sequence
  FMC63 LC-CDR2
HTSRLHS

SEQ ID NO: 202 - protein, 18 aa, Artificial Sequence
  Linker
GSTSGSGKPGSGEGSTKG

SEQ ID NO: 203 - DNA, 735 bp, Artificial Sequence
  Sequence encoding scFv
gacatccagatgacccagaccacctccagcctgagcgccagcctgggcgaccgggtgaccatcagctgccgggccagccaggacatcagcaagtacctgaactggtatcagcagaagcccgacggcaccgtcaagctgctgatctaccacaccagccggctgcacagcggcgtgcccagccggtttagcggcagcggctccggcaccgactacagcctgaccatctccaacctggaacaggaagatatcgccacctacttttgccagcagggcaacacactgccctacacctttggcggcggaacaaagctggaaatcaccggcagcacctccggcagcggcaagcctggcagcggcgagggcagcaccaagggcgaggtgaagctgcaggaaagcggccctggcctggtggcccccagccagagcctgagcgtgacctgcaccgtgagcggcgtgagcctgcccgactacggcgtgagctggatccggcagccccccaggaagggcctggaatggctgggcgtgatctggggcagcgagaccacctactacaacagcgccctgaagagccggctgaccatcatcaaggacaacagcaagagccaggtgttcctgaagatgaacagcctgcagaccgacgacaccgccatctactactgcgccaagcactactactacggcggcagctacgccatggactactggggccagggcaccagcgtgaccgtgagcagc
